(19) United States
(12) Patent Application Publication
(10) Pub. No.: US 2022/0132862 A1
(43) Pub. Date: May 5, 2022

(54) PSEUDOMONAS SP. STRAIN, COMPOSITION COMPRISING THE SAME, AND USES THEREOF

(71) Applicant: FUTURECO BIOSCIENCE, S.A., Olèrdola (ES)

(72) Inventors: Carolina FERNÁNDEZ CASTILLO, Olèrdola (ES); José Manuel LARA SÁNCHEZ, Olèrdola (ES)

(21) Appl. No.: 17/440,750

(22) PCT Filed: Mar. 16, 2020
(86) PCT No.: PCT/EP2020/057051

§ 371 Date: Sep. 17, 2021

(30) Foreign Application Priority Data
Mar. 18, 2019 (EP) 19382190.7

(51) Int. Cl. A01N 63/27; C12N 1/20; C12N 1/02; C12N 15/78

(52) U.S. Cl. CPC A01N 63/27; C12N 1/205; C12R 2001/38; C12N 15/78; C12N 2511/00; C12N 1/02

(57) ABSTRACT

The present invention relates to a new isolated strain of Pseudomonas sp. deposited at the “Colección Española de Cultivos Tipo” (CECT) under the accession number CECT8708 or a mutant thereof; wherein said mutant is obtained using the CECT8708 of Pseudomonas sp. as starting material, maintains the dual bactericidal and fungicidal effects of CECT8708 and has a genome with an Average Nucleotide Identity (ANI) to the genome sequence SEQ ID NO: 1 of at least 99.8%. The strain of the invention has bactericidal and fungicidal effect.

The invention also relates to the inoculation product comprising the strain of the invention, the cell-free extract derived from the strain of the invention, and the composition comprising it and their uses in the control of bacteria and/or fungal infection in a plant. Also refers to a method to obtain the mutant strain of the strain of the invention.

### CROSS-REFERENCE TO RELATED APPLICATIONS

[0001] This application is a U.S. national phase entry of International Patent Application No. PCT/EP2020/057051, filed Mar. 16, 2020, which claims priority to and the benefit of European Patent Application EP19382190.7 filed on Mar. 18, 2019. The contents of both related applications are incorporated herein by reference in their entirety.

### INCORPORATION-BY-REFERENCE TO SEQUENCE LISTING SUBMITTED

[0002] This application contains a sequence listing entitled “108663_00282_ST25.txt,” being submitted herein in ASCII format via EFS-Web, which is a copy of the sequence listing as filed in the PCT/EP2020/057051, which was renamed on Sep. 17, 2021 and is 7.56 megabytes in size.

### TECHNICAL FIELD

[0003] The present invention relates to the field of phytosanitary products. It provides a new isolated strain of the microorganism Pseudomonas sp., extract and compositions comprising thereof and their use in the biological control of diseases caused by bacterial and/or fungal infections in plants.

### BACKGROUND ART

[0004] Chemical pesticides are known to contaminate the environment. They have been used on crops across the world for several years, creating an accumulation of adverse pollution in our environment, which continues to grow with every application. Studies have demonstrated that chemical pesticides persist in the ground, the waterways and the atmosphere long after they have been used.

[0005] Unfortunately, when chemical pesticides are applied onto a surface, they travel outside their intended area of use by air, soil or water. This can lead to pollution of surface water and groundwater, reduced pest control, and damaging of non-target species, including humans.

[0006] In addition, chemical pesticides not only contaminate food, but they also drain the nutritional value of it. Research has consistently reported chemical pesticide residues in a third of food, including lettuces, potatoes, peaches, strawberries, apples, cereal bars, baby food, bread, fresh salmon, and lemons. Despite pesticides are designed to kill living organisms, they are certainly not meant to enter human bodies. However, they have been linked to a myriad of diseases.

[0007] Luckily, from time ago the use of biocontrol agents has become more and more established to avoid the undesirable effects of the chemical pesticides. This kind of pesticides, the biopesticides, has been reported to decrease the diseases intensity, play a key role in integrated management of diseases, be more selective and effective than conventional pesticides, be safer for the users and the farming community, and provide a natural long term immunity to crops and soil.

[0008] In this context, in the last 15 years the use of biocontrol agents has increased four times in crop plants. However, it is worth mentioning that the host and environmental conditions affect the biological activity of the bacteria strains, making their effectiveness sometimes lower and variable than the reference chemical products.

[0009] Therefore, in spite of the efforts made, there is a need for finding new biocontrol agents.

### SUMMARY OF THE INVENTION

[0010] The inventors have surprisingly found one strain of the Pseudomonas sp. (hereinafter also referred as “strain B2021”) which has a remarkable pesticide activity against both bacteria and fungi as shown in Example 4. In addition, the inventors have also found that the strain of the invention has surfactant activity which, on one hand, contributes to the high anti-bacterial and fungal activity of the strain of the invention, and, on the other hand, may provide beneficial effects not only to the plants to be protected but also to the soil where they are grown.

[0011] As it is shown below, the strain of the invention has been tested in several assays to prove its antibacterial effect. Thus, the biofilm formation inhibition assay to validate its capacity to inhibit the biofilm formation of a strain of Xanthomonas vesictoria (Example 4A and FIG. 1); as well as bioassays on potato and tomato plants against an Erwinia carotovora strain (Example 4C; Table 15) and a Pseudomonas syringae pv tomato Example 4D; Table 17), respectively, were performed. In all cases, the strain of the invention demonstrated to be efficient in inhibiting the bacterial growth and when compared with commercially available biocontrol agents it exhibited even better results.

[0012] As mentioned, the strain of the invention has also anti-fungal effect as shown in Examples 4B and 4F. The strain B2021 inhibited a 50% the severity of the Rhizoctonia solani infection on a potato plant, having an efficacy equivalent to the commercially available chemical pesticide Cuproflow.

[0013] The inventors have also found that the strain of the invention has the ability to produce and secrete to the medium siderophores and surfactant metabolites (Example 2 and 3). The inventors have also found that these secreted metabolites contribute to the dual antibacterial and antifungal effect (Example 4E and 4F).

[0014] In addition, to such outstanding activity profile, it was also found that the strain of the present invention did not present acute oral toxicity in vivo in rats. The results of Example 6 show that animals had no visible clinical adverse effects and no infectivity of pathogenicity was found. Without being bound to the theory it is believed that this can be at least due to the fact that the strain of the invention has an optimal temperature growth range of 28° C.-30° C.

[0015] The biological nature of the strain makes it, when used as pesticide, environmentally friendly.

[0016] In addition, the strain of the invention is mesophile and neutrophil, is capable of growing from 0% to 4% of NaCl and it is considered a non-halotolerant strain. These features contribute to the ability of the strain to efficiently colonize the soil.

[0017] Furthermore, it shows sensitivity to oxytetracycline and is highly resistance to Streptomycin sulfate (Table 8).

[0018] Altogether the strain of the present invention means a great advance in the field of biopesticides.

[0019] When the present inventors performed the genomic characterization of the strain of the invention (by (ANI analysis), they found that it belonged to Pseudomonas genus and that it was not coincident to any of the already known species but only close to Pseudomonas fluorescens and Pseudomonas azotoformans.

[0020] In particular, when strain's genome sequence SEQ ID NO: 1 was aligned to different genomes of strains of P. fluorescens, P. azotoformans, and P. yarnanorum for ANI calculation, it was found that ANIb and ANIm values were lower than 89%. The established cut-off used to confirm that two strains belong to the same species corresponds to an ANI of 95±0.5%. That is, the strain of the invention pertains to a new specie, which has not been reported before.

[0021] Thus, the first aspect of the present invention refers to a strain of Pseudomonas sp. having a genome with an ANI to the genome sequence SEQ ID NO:1 of at least 95%.

[0022] In the present invention the terms “B2021” and “CECT8708”, referring to the strain of the invention, are used interchangeably.

[0023] The strain of the invention was isolated from an agricultural soil in Almeria (Spain) and was deposited, according to the Budapest Treaty, at the CECT in the Universidad de Valencia C.P 46980 Catedrático Agustin Escardino N^{o} 9 Paterna, Valencia (Spain), under the accession number CECT8708. It was deposited by the depositor Fututeco Bioscience S.A., Av. Del Cadi 19-23 P.I. Sant Pere Molanta 08799 Olèrdola Barcelona, on the 23, Sep. 2014. The strain was identified by the depositor with the reference B2021, and received the accession number CECT8708. It was, in addition, declared viable.

[0024] A second aspect of the present invention refers to a process for obtaining a viable cell suspension derived from the strain as defined in the first aspect, the process comprising: (i) inoculating the strain in a culture medium, (ii) subjecting the inoculated culture medium of the step (i) to conditions suitable for growth of the strain, and (iii) optionally subjecting the medium resulting from step (ii) to a concentration step.

[0025] As shown below the cell-free extract (CS) fraction of the invention shows the antibacterial and antifungal capacities of the cell extract including the strain of the invention. This matches with the finding that the strain produces and secretes siderophores and surfactant (Examples 2 and 3, table 11, FIG. 3).

[0026] In Examples 3 and 4F, the cell-free extract from a Pseudomonas azotoformans strain and the one of the invention were compared in terms of components and antifungal activity. As shown below, the antifungal activity of the CS of the invention was higher than the one achieved with the CS derived from the Pseudomonas azotoformans strain. In addition, it was found that only the CS of the invention was able to produce surfactant (FIG. 4).

[0027] This is indicative that the strain of the invention produces a well-differentiated CS.

[0028] The inventors have found that the cell-free extract of the invention comprises pyoverdin-type siderophores as well as surfactant metabolites.

[0029] Thus, a third aspect of the present invention refers to a cell-free extract derived from the strain as defined in the first aspect, said extract being obtainable by a process comprising: (i) inoculating the strain in a suitable culture medium, (ii) subjecting the inoculated culture medium to suitable growth conditions, (iii) separating the cells from the culture medium of step (ii), (iv) collecting cell-free extract; and (v) optionally subjecting the cell-free extract to a concentration process.

[0030] A fourth aspect of the present invention refers to an inoculation product comprising the strain as defined in the first aspect.

[0031] Due to the pesticidal effect of the strain of the present invention, it can be used as a phytosanitary product. As it is illustrated in the examples below, the strain of the first aspect of the invention or the cell-free extract of the third aspect of the invention can be used as a phytosanitary product according to FAO guidelines, which are the guidelines emitted by Food and Agriculture Organization of the United Nations. The isolated bacteria as defined in the first aspect of the invention or the cell-free extract as defined in the third aspect may be used as ingredient of a phytosanitary composition.

[0032] Therefore, a fifth aspect of the present invention refers to a composition comprising the strain as defined in the first aspect, or the extract as defined in the third aspect of the invention, or an inoculation product as defined in the fourth aspect of the invention, and one or more agriculturally acceptable compound(s).

[0033] A sixth aspect of the present invention refers to a method to obtain a mutant of the strain of CECT8708 of Pseudomonas sp. which maintains the bactericidal and fungicidal effect of CECT8708, comprising the step of subjecting the strain CECT8708 to a DNA recombinant technique, preferably mutagenesis.

[0034] A seventh aspect of the present invention refers to the use of the strain as defined in the first aspect of the invention, or the extract as defined in the third aspect of the invention, or the inoculation product as defined in the fourth aspect of the invention, or the composition as defined in the fifth aspect of the invention as a pesticide in plants.

[0035] An eighth aspect of the present invention relates to a method for controlling an infection caused by bacterial or fungal pathogen in a plant, comprising applying the strain as defined in the first aspect of the invention, or the extract as defined in the third aspect of the invention, or the inoculation product as defined in the fourth aspect of the invention, or the composition as defined in the fifth aspect of the invention, to the affected part of the plant and/or to the seed or to the substrate or soil used for growing said plant.

[0036] A ninth aspect of the present invention relates to a kit comprising an effective amount of the strain as defined in the first aspect of the invention, or the extract as defined in the third aspect of the invention, or the inoculation product as defined in the fourth aspect of the invention, or the composition as defined in the fifth aspect of the invention.

[0037] A tenth aspect of the invention refers to the use of the kit of the ninth aspect of the invention for controlling an infection caused by bacterial pathogens and/or fungal pathogens in a plant.

### BRIEF DESCRIPTION OF THE DRAWINGS

[0038] FIG. 1 shows the results of the biofilm inhibitory assay described in Example 4A.

[0039] FIG. 2A and FIG. 28 HPLC chromatograms at 254 nm of CS produced by B2021 (FIG. 2A) and DSM 18862 (FIG. 2B). Each chromatogram corresponds to KingBmod culture medium (black line), bacterial incubation in KingBmod medium (dashed line) and bacterial incubation in medium supplemented with iron (dotted line)

[0040] FIG. 3 Surfactant activity of CS produced by the strain of the invention B2021 and the Pseudomonas azotoformans strain DSM 18862 compared with H₂O and the KingBmod culture medium as controls.

### DETAILED DESCRIPTION OF THE INVENTION

[0041] All terms as used herein in this application, unless otherwise stated, shall be understood in their ordinary meaning as known in the art Other more specific definitions for certain terms as used in the present application are as set forth below and are intended to apply uniformly throughout the specification and claims unless an otherwise expressly set out definition provides a broader definition. The definitions given herein are included for the purpose of understanding and expected to be applied throughout description, claims and drawings.

[0042] The first aspect of the invention refers to an isolated strain of a Pseudomonas sp. having a genome with an Average Nucleotide Identity (ANI) to the genome sequence SEQ ID NO: 1 of at least 95%.

[0043] “Average Nucleotide Identity” also referred herein as ANI is a descriptor of genetic relatedness. This descriptor is derived from lineage-specific genes and widely distributed genes (typically >1000 genes in total), thereby increasing the robustness and resolution of extracted phylogenetic signals. Furthermore, since ANI is based on a large number of genes, it is a better measure of relatedness than data derived from a singe gene, such as the 16S rRNA gene. In addition, varied evolutionary rates or horizontal gene transfer of single or a few genes do not significantly affect ANI values, since the effect of fast-evolving genes is mitigated by the slow evolution of other genes. According to several studies, the recommended cut-off point of 70% DNA-DNA hybridization (DDH) data for species delineation thereby corresponded to an ANI of 95±0.5% (Arahal et al., Methods in Microbiology, Chapter 6, Whole genome analysis: Average Nucleotide Identity, Vol. 41 ISSN 0580-9517).

[0044] To run this kind of analysis, one has to perform whole genome sequencing of the strain of interest. To do so, the genomic DNA has to be extracted and quantified. To extract sufficient high quality DNA for whole genome sequencing, many different methods including conventional procedures and the use of commercial kits, can be carried out. After that, whole genome sequencing can be performed with high-throughput DNA sequencing technology using benchtop instruments such as, but not limited to, 454 GS FLX Titanium/GS Junior (Roche), Genome Analyzer/HiSeq 2000/MiSeq (Illumina), SOLiD/Ion Torrent PGM (Life Technologies), or RS (Pacific Biosciences).

[0045] ANI calculations can be done using the JSpecies server (http://jspecies.ribohost.com/jspeciesws). To calculate species relationships two additional software packages need to be installed which are BLAST (ftp://ftp.ncbi.nih.gov/blast/executables/) and MUMmer (http://mummer.sourceforge.net). BLAST search algorithm follows a hashing approach that involves the generation of a large number of short sequence stretches and character comparisons, whereas MUMmer makes use of suffix trees to find potential anchors for an alignment. The BLAST calculation of ANI values, using the Blast algorithm, is called ANIb and ANI values calculated by using the NUCmer program in the MUMmer software package are called ANIm.

[0046] As shown below, the inventors have carried out the genomic characterization of the strain of the invention. To that aim, first, 16S rRNA gene sequence was amplified by PCR, sequenced and aligned with the BLAST suite to find out the species of the strain of the invention. The parameters used to analyse the 16S rRNA sequence were those established by default except for the following: the Database: Nucleotide collection (nr/nt): the Organism: Pseudomonas (taxid: 286): Limit to: Sequences from type material; and Optimized for. Somewhat similar sequences (blastn). According to their results, the strain of the invention had a 99-100% identity to the 16S rRNA gene of three different Pseudomonas azotoformans strains, two Pseudomonas mucidolens strains, and two Pseudomonas synxantha (Table 1). Although the 16S rRNA has been widely used for species identification, in the Pseudomonas genus this criterium is not enough to identify a species since, as can be extracted also from the results obtained, there are several species that share common 16S rRNA gene sequence.

[0047] Next, rpoD, gyrB and gyrA genes sequences were obtained from the whole genome sequence and analysed with the BLAST suite using the same parameters as 16S rRNA analysis. Regarding rpoD gene, the closest sequences belonged to three different species of Pseudomonas, the P. fluorescens ATCC13525, the P. azotoformans LMG21611, and the P. yarnanorum LMG2747 (Table 2). Regarding gyrB gene, the closest sequences belonged to three different species of Pseudomonas too, the P. synxantha LMG2190, the P. azotoformans LMG21611, and the P. fluorescens ATCC13525 (Table 3). Finally, in the case of the gyrA gene, the closest sequences belonged to three different species of Pseudomonas too, the P. azotoformans LMG21611, the P. synxantha LMG2190, and the P. extremaustralis DSM 17835 (Table 4). Taking into account the results of this homology analysis, there were three species which were considered to be the more closely related with the strain of the invention that are P. fluorescens ATCC13525, the P. azotoformans LMG21611, and the P. yarnanorum LMG2747, as they appeared in the results of all the genes examined in the first five positions.

[0048] To further dissect the species of the strain of the invention, the genomes of the strains identified to be more closely related P. fluorescens ATCC13525. P. azotoformans LMG21611, P. fluorescens NCTC_10038, P. yarnanorum LMG2747, P. azotoformans S4, P. azotoformans F77, and the one from the strain of the invention (SEQ ID NO: 1) were compared using ANIb and ANIm calculation using the parameters by default appearing in the online tool (Table 5 to 7).

[0049] Thus, in one embodiment, optionally in combination with any of the embodiments provided above or below, the ANI value is obtained using an ANIb algorithm or an ANIm algorithm.

[0050] As shown in Example 1C, the inventors did not find any species with an ANIb higher than 86.24, and an ANIm higher than 88.38, which indicated that the strain of the invention did not belong to any of those species and, thus, that it has not been reported before.

[0051] In another embodiment, the strain has a genome with an Average Nucleotide Identity (ANI) to the genome sequence of SEQ ID NO: 1 of at least 95%, 96%, 97%, 98%, 99%, 99.1%, 99.2%, 99.3%, 99.4%, 99.5%, 99.6%, 99.7%, 99.8%, 99.9% or 100%.

[0052] In another embodiment, the strain has a genome with an Average Nucleotide Identity (ANI) to the genome sequence of SEQ ID NO: 1 of about 95%, 96%, 97%, 98%, 99%, or 100%.

[0053] The term “about” or “around” as used herein refers to a range of values ±10% of a specified value. For example, the expression “about 10” or “around 10” includes ±10% of 10, i.e. from 9 to 11.

[0054] In the present invention the terms “B2021” and “CECT8708”, referring to the strain of the invention, are used interchangeably.

[0055] The embodiment wherein the ANI is of 100% corresponds to the exact strain isolated by the inventors, which was isolated from an agricultural soil in Almeria (Spain) and was deposited, according to the Budapest Treaty, at the CECT in the Universidad de Valencia C.P 46980 Catedrático Agustin Escardino N^{o} 9 Paterna, Valencia (Spain), under the accession number CECT8708. It was deposited by the depositor Fututeco Bioscience S.A., Av. Del Cadi 19-23 P.I. Sant Pere Molanta 08799 Olèrdola Barcelona, on the 23, Sep. 2014. The strain was identified by the depositor with the reference B2021, and received the accession number CECT8708. It was, in addition, declared viable.

[0056] In one embodiment of the first aspect of the invention, optionally in combination with any of the embodiments provided below, the isolated strain of Pseudomonas sp. is the strain B2021 deposited at the “Colecciión Española de Cultivos Tipo (CECT)” under the accession number CECT8708.

[0057] The inventors have genomically characterized the strain of the invention and have identified this strain to belong to a species not reported before. Being the Pseudomonas fluorescens and Pseudomonas azotoformans the more closely related taking into account the comparative analysis performed (Example 1).

[0058] Alternatively, in another embodiment of the first aspect of the invention the strain is a mutant of the strain CECT8708, the mutant maintaining the bactericidal effect and fungicidal effect of CECT8708. In another embodiment of the first aspect of the invention, the mutant further maintains the ability of producing the surfactant.

[0059] The term “mutant” of the strain CECT8708 is also understood according to the invention as a “variant” of the strain CECT8708 and is defined as a strain having a genome with an Average Nucleotide Identity (ANI) to the genome sequence of SEQ ID NO: 1 of at least 99.8%.

[0060] By using the deposited strain as starting material, the skilled person in the art can routinely, by genetic engineering techniques such as mutagenesis or bacterial recombination techniques, obtain mutants that maintain the herein described relevant features and advantages of the strain of the invention. In an embodiment of the invention, the mutant is a genetically modified mutant obtained by random mutagenesis (i.e. using chemical or physical agents) or by site-directed mutagenesis, combinatorial mutagenesis or insertional mutagenesis. In another embodiment of the first aspect of the present invention, the mutant is obtained by using recombinant technology, for example using transformation (for example, by electroporation, heat-shock or using divalent cation solutions, such as calcium chloride), transduction or conjugation techniques. By using recombinant technology, a plasmid can be included in the bacterial strain, said plasmid can comprise antibiotic resistant genes or genes that serve for the selection of the mutant. Examples of genetic engineering techniques can be found in Sambrook, J. and Russell, D. W. “Molecular Cloning: A Laboratory Manual”, Chapter 13, “Mutagenesis”, Cold Spring Harbor, 3rd Ed. 2001.

[0061] As mentioned above, the mutant provided by the present invention has to maintain the dual effect shown by the strain CECT8708, i.e., the anti-bacterial and anti-fungal activities. In the present invention the term “maintain”, when referred to the mutant, means that it has to display both the anti-bacterial and anti-fungal activities. Of course, as a consequence of the mutation in the strain, the resulting mutant encompassed by the present invention can display both activities more efficiently than the strain CECT8708.

[0062] In order to determine whether the mutant maintains the dual profile as anti-bacterial and anti-fungal, several well-known protocols can be followed. These methods are commonly based on the analysis of the growth capacity of the pathogen in contact with the strain, or the assessment of the severity of the disease caused by the pathogen infection after the exposition to the strain. The protocols that are included in the examples herein for the determination of the activity are illustrative and non-limitative examples.

[0063] In an embodiment of the first aspect of the invention, optionally in combination with any of the embodiments provided above or below, the bactericidal effect is at least against bacteria of the genus Xanthomonas, Pseudomonas and Erwinia. In another embodiment, the bactericidal effect is against one or more of Xanthomonas vesicatoria. Pseudomonas syringae, and Erwinia carotovora. In another embodiment, the strain as defined in the first aspect of the invention has a bactericidal effect against Xanthomonas vesicatoria, Pseudomonas syringae, and Erwinia carotovora.

[0064] In another embodiment of the first aspect of the invention, optionally in combination with any of the embodiments provided above or below, the strain as defined in the first aspect of the invention has a fungicidal effect at least against fungi of the genus Rhizoctonia and Botrytis. In a further embodiment, optionally in combination with any of the embodiments provided above or below, the strain as defined in the first aspect of the invention has a fungicidal effect against one or more of Rhizoctonia solani and Botrytis aclada. In another embodiment, the strain as defined in the first aspect of the invention has a fungicidal effect against Rhizoctonia solani and Botrytis aclada.

[0065] In another embodiment of the first aspect of the invention, optionally in combination with any of the embodiments provided above or below, the strain as defined in the first aspect of the invention has a bactericidal effect at least against bacteria of the genus Xanthomonas, Pseudomonas, and Erwinia; and a fungicidal effect at least against fungi of the genus Rhizoctonia and Botrytis. In a further embodiment, optionally in combination with any of the embodiments provided above or below, the strain as defined in the first aspect of the invention has a bactericidal effect against Xanthomonas vesicatoria, Pseudomonas syringae, and Erwinia carotovora; and a fungicidal effect against Rhizoctonia solani and Botrytis aclada.

[0066] In a second aspect, the present invention provides a process for obtaining a viable cell suspension derived from the strain as defined in the first aspect of the invention, the process comprising: (i) inoculating the strain in a culture medium, (ii) subjecting the inoculated culture medium of step (i) to conditions suitable for growth of the strain, and (iii) optionally subjecting the medium resulting from step (ii) to a concentration step.

[0067] The term “derived from the strain of the invention” means that the suspension is obtained from the strain object of the present invention.

[0068] The strain of the invention may be inoculated in the culture medium at a final concentration comprised from 5 to 7% v/v. Preferably the inoculated culture is in an exponential growth phase. Cell growth will slow on achieving, preferably, a cell concentration comprised from 1.0×10⁹ to 1.0×10¹⁰ CFU/mL. Suitable culture media for the growth of the strain of the invention are synthetic media, such as LB (lysogenic broth) and PM (saline production medium), or media of plant origin such as molasses (e.g. from sugar cane, beets and others). Suitable conditions for strain's growth are temperatures comprised from 24 to 30° C., pH comprised 6 to 8, and oxygen concentration comprised from 50 to 100%. The growth of the strain of the invention is produced by stirring. An example of the detailed method for obtaining cells from the strain of the invention is reflected in Example 5.

[0069] In another embodiment of the process for obtaining the suspension, cells are separated from the medium to obtain a concentrated suspension. Suitable separation techniques include centrifugation or filtration of the culture. Carrying out the centrifugation of the culture, for example, at a minimum of 7000 rpm, cells are obtained in the pellet, which are resuspended in part of the culture medium or in a suitable buffered medium such that the strain concentration is approximately about 5×10¹⁰ CFU/mL.

[0070] Once the suspension is obtained, it may be subjected to a dehydration step. Dehydration can be carried out through a lyophilisation process. Alternatively, the suspension can be dehydrated by fluidised bed drying. Another option is to dehydrate the suspension by spray drying or drying in an oven under vacuum. In order to improve cell viability, an inert osmotic protector ingredient can be added to the suspension before carrying out the dehydration process.

[0071] In another embodiment of the second aspect of the invention, the process comprises resuspending the cells resulting from the separation step in a suitable buffer to yield a cell concentrated suspension.

[0072] As mentioned above, the CS extract from the strain of the invention has been proved to maintain the anti-bacterial and anti-fungi activities (Example 4E and 4F). In this regard, the inventors have found that these effects are related to the siderophore production by the strain of the invention. As shown in Example 4E and 4F, when the CS extract is obtained in the presence of iron, that is, no siderophores can be produced, the anti-microbial effect of the strain of the invention is importantly reduced (Table 18 and 19).

[0073] In a third aspect, the present invention provides a cell-free extract derived from the strain as defined in the first aspect of the invention, said extract being obtainable by a process comprising: (i) inoculating the strain in a suitable culture medium; (ii) subjecting the inoculated culture medium to suitable growth conditions; (iii) separating the cells from the culture medium of step (ii); (iv) collecting the cell-free extract; and (v) optionally subjecting the cell-free extract to a concentration step.

[0074] As commented above and shown below, the activity profile of the cell-free extract activity may be modulated on the basis of the composition of the culture medium. In one embodiment of the third aspect, optionally in combination with any of the embodiments provided above or below, the suitable culture medium is free of iron. Advantageously, in an iron-free medium, the strain of the invention is capable of producing siderophores.

[0075] The cell-free medium obtained by the separation processes described above, could be used and/or included in an appropriated formulation directly or subjected to a concentration step to reach a more suitable composition. Thus, in an embodiment of the third aspect, the invention relates different protocols to concentrate the cell-free extract that can be used, such as dehydration, filtration, ultra-filtration, centrifugation, ultra-centrifugation, precipitation, or chromatography.

[0076] In an embodiment of the third aspect of the invention, optionally in combination with any of the embodiments provided above or below, the dehydration is carried out through a lyophilisation process. Alternatively, as mentioned above, the CS extract can be dehydrated by fluidised bed drying, by spray drying or drying in an oven under vacuum.

[0077] A fourth aspect of the invention refers to an inoculation product comprising the strain or a mutant thereof as defined in the first aspect of the invention.

[0078] By “inoculation product” it is understood a product obtained after inoculating the strain in a suitable culture medium, subjecting the inoculated culture medium to suitable growth conditions.

[0079] In an embodiment of the fourth aspect of the invention, optionally in combination with any of the embodiments provided above or below, the inoculation product comprises a viable strain as defined in the first aspect of the invention.

[0080] In another embodiment of the fourth aspect of the invention, optionally in combination with any of the embodiments provided above or below, the inoculation product comprises the strain of the invention inactivated.

[0081] The term “inactivated” means that the micro-organism is not able to form colonies. In one embodiment, the inactivated micro-organisms have the cell membrane intact or broken.

[0082] The term “inoculation product comprising the strain of the invention inactivated” refers to a product obtained after inoculating the strain in a suitable culture medium, subjecting the inoculated culture medium to suitable growth conditions, and then inactivating the strain.

[0083] With a view to practical use in pest control, pesticide agents are usually formulated into compositions also including agriculturally acceptable compounds. Therefore, a fifth aspect of the present invention refers to a composition comprising the strain as defined in the first aspect, or the extract as defined in the third aspect of the invention, or the inoculation product as defined in the fourth aspect of the invention, and one or more agriculturally acceptable compound(s).

[0084] The term “effective amount” as used herein, means an amount of the strain of the invention, or the CS extract, high enough to provide the desired benefit, either the treatment or prevention of the plant disease, but low enough to avoid serious side-effects. The particular dose administered according to this invention will of course be determined by the particular circumstances surrounding the case, including the compound administered, the route of administration, the particular condition being treated, and the similar considerations.

[0085] In an embodiment of the fifth aspect of the invention, optionally in combination with any of the embodiments provided above or below, the strain is present at a concentration from 10⁵ cfu/mL to 10¹² cfu/mL. In another embodiment of the fifth aspect of the invention, the strain is present at a concentration of 10⁵ cfu/mL, 10⁶ cfu/mL, 10⁷ cfu/Ml, 10⁸ cfu/mL, 10⁹ cfu/mL, 10¹⁰ cfu/mL, 10¹¹ cfu/mL or 10¹² cfu/mL.

[0086] For the purposes of the invention, any ranges given include both the lower and the upper end-points of the range.

[0087] The amount indicated as cfu/mL relates to the colony forming units (CFU) of the strain of the invention per mL.

[0088] In an embodiment of the fifth aspect of the invention, optionally in combination with any of the embodiments provided above or below, the CS extract is at a percentage in volume with respect to the total volume of the composition (v/v) from 5 to 99%. In another embodiment of the fifth aspect of the invention, optionally in combination with any of the embodiments provided above or below, the CS extract is at a percentage in volume with respect to the total volume of the composition (v/v) from 10 to 60%. In another embodiment of the fifth aspect of the invention, optionally in combination with any of the embodiments provided above or below, the CS extract is at a percentage of 10 or 50% v.

[0089] In another embodiment of the fifth aspect of the invention, optionally in combination with any of the embodiments provided above or below, the composition is a phytosanitary composition.

[0090] In another embodiment of the fifth aspect of the invention, optionally in combination with any of the embodiments provided above or below, the agriculturally acceptable compound is selected from the group consisting of: plant strengtheners, nutrients, wetting agents, compounds that improve adherence, buffering compounds, stabilizers, antioxidants, osmotic protectors and sunscreens.

[0091] In another embodiment of the fifth aspect of the invention, optionally in combination with any of the embodiments provided above or below, the composition comprises at least one additional pesticide.

[0092] In another embodiment of the fifth aspect of the invention, optionally in combination with any of the embodiments provided above or below, the additional pesticide is selected from the group consisting of another bacterial strain with pesticide properties, a fungicide, a bactericide, an herbicide, a chemical insecticide or a chemical nematicide. Said additional pesticide does not have to adversely affect the activity/viability of the strain of the invention included in the composition.

[0093] In the present invention, the term “pesticide” is understood by its usual meaning in the field of agronomy as a product intended to kill, repel, regulate or disrupt the growth of living organisms that are considered pests. Clearly, due to the nature of the strain of the invention, herein it is understood that “pesticide” is a biological or ecological (organic) pesticide, also called biopesticide. In the scope of the present invention, the term “pesticide” would have the same meaning as the term “phytosanitary”.

[0094] In an embodiment of the fifth aspect of the invention, optionally in combination with any of the embodiments provided above or below, it can be in the form of a solution, a pellet, a suspension, a lyophilized compositions or other dried compositions (for example freeze dried composition). The lyophilized or dried composition can be reconstituted with a liquid carrier prior to its use or directly used. The composition may be prepared according to various formulations suitable for phytosanitary uses, for example, chosen from the group consisting of formulations of the following type: liquid intended for use without dilution (AL), powder intended for use without dilution (AP), encapsulated granule (CG), contact liquid or gel (CL), contact powder (CP), powdering powder (DP), emulsifiable concentrate (EC), emulsifiable granule (EG), oil type emulsion (EO), water type emulsion (EW), fine granule (FG), macrogranules (GG), emulsifiable gel (GL), powder for spraying (GP), granules (GR), grease (GS), water-soluble gel (GW), microemulsion (ME), microgranules (MG), water-dilutable concentrated suspension (OF), oil dispersion (OD), water-miscible suspension (OL), powder for dispersion in oil (OP), concentrated in gel or paste form (PC), sticks (for agri-pharmaceutical use) (PR), concentrated suspension (SC), suspoemulsion (SE), water-soluble granules (DG), soluble concentrate (SL), film-forming oil (SO), water-soluble powder (SP), water-soluble tablets (ST), tablets (TB), water-dispersible granules (WG), wettable powder (WP), water-dispersible tablets (WT) (the code consisting of two capital letters corresponding to the international codes for phytosanitary formulations).

[0095] In an embodiment of the fifth aspect of the invention, optionally in combination with any of the embodiments provided above or below, the composition is a Technical Grade Active Ingredient (TGAI) composition.

[0096] In an embodiment of the fifth aspect of the invention, optionally in combination with any of the embodiments provided above or below, the composition is a lyophilized or dried composition and comprises a concentration of the strain as defined in the first aspect of the invention in the range from 5.0×10¹⁰ and 2×10¹¹ CFU/g or ml.

[0097] In an embodiment of the fifth aspect of the invention, optionally in combination with any of the embodiments provided above or below, the composition is a lyophilized or dried composition and comprises a concentration of the strain as defined in the first aspect of the invention of 1.0×10¹¹ CFU/g.

[0098] In an embodiment of the fifth aspect of the invention, optionally in combination with any of the embodiments provided above or below, the composition is an oil dispersion (OD) composition.

[0099] In an embodiment of the fifth aspect of the invention, optionally in combination with any of the embodiments provided above or below, the composition is an OD formulation and comprises a concentration of the strain as defined in the first aspect of the invention in the range from 1.0×10⁹ to 1.0×10¹⁰ CFU/mL.

[0100] In an embodiment of the fifth aspect of the invention, optionally in combination with any of the embodiments provided above or below, the composition is an OD formulation and comprises a concentration of the strain as defined in the first aspect of the invention of 5×10⁹ CFU/mL.

[0101] In an embodiment of the fifth aspect of the invention, optionally in combination with any of the embodiments provided above or below, the composition is a WP formulation and comprises an effective amount of the cell-free extract as defined in the third aspect.

[0102] “Agriculturally acceptable compounds” refers to those compounds and/or materials, which are suitable for use in agriculture. In general, said compounds should be non-toxic to humans and preferably should be environment-friendly.

[0103] In an embodiment of the fifth aspect of the invention, the compositions of the invention may contain compounds for improving the adhesion of the strains in the plants to be treated, as well as phytostrengthener compounds, nutrients, wetting agents, stabilizers, osmotic protectors, antioxidants, sunscreens, buffering compounds or combinations thereof.

[0104] Examples of adhesion products are gelatin, starch, pectins, alginates and various types of gums such as xanthan. Many of these compounds are also wetting agents. In the case of sunscreens, Congo red, calcium carbonate and wax emulsions can be used. The phytostrengtheners are compounds that can facilitate make crops develop robustness or tolerance towards pathogens or adverse environmental conditions, for example, jasmonic acid analogues and some plant defense stimulants such as harpins, chitosans, and laminarins. Additionally, examples of osmotic protectors are trehalose, betaines and amino acids. Finally, ascorbic acid and glutathione are included among antioxidants.

[0105] The compositions of the fifth aspect of the invention can be prepared by routine protocols, such as by mixing the different ingredients.

[0106] A sixth aspect of the invention refers to a method to obtain a mutant of the strain of CECT8708, which maintains the bactericidal and fungicidal effect of CECT8708 comprising the step of subjecting the strain of CECT8708 to a genetic engineering technique.

[0107] In an embodiment of the sixth aspect of the invention, the mutant also maintains the ability of producing siderophores and surfactants.

[0108] In another embodiment of the sixth aspect of the invention, the genetic engineering technique is mutagenesis, such as random mutagenesis (i.e. using chemical or physical agents), by site-directed mutagenesis, combinatorial mutagenesis or insertional mutagenesis; or a recombinant technique, such as transformation (for example, by electroporation, heat-shock or using divalent cation solutions, such as calcium chloride), transduction or conjugation techniques. In another embodiment of the fourth aspect of the invention, the genetic engineering technique is mutagenesis.

[0109] In view of the above, the seventh aspect of the invention refers to the use of the strain as defined in the first aspect of the invention, or the extract as defined in the third aspect of the invention, or the inoculation product as defined in the fourth aspect of the invention, or the composition as defined in the fifth aspect of the invention as a pesticide in plants.

[0110] In an embodiment of the seventh aspect of the invention, the strain, extract, inoculation or composition is used for controlling a disease caused by a bacterium or fungus in a plant

[0111] In the present invention, the term “control of the disease” means that it prevents, reduces, cures or eradicates the disease.

[0112] In an embodiment of the seventh aspect of the invention, the strain is used in preventing infections caused by bacteria or fungi in plants. In a further embodiment, the CS extract as defined in the third aspect is used in preventing infections caused by bacteria or fungi in plants.

[0113] The eight aspect of the invention refers to a method for controlling an infection caused by bacterial or fungal pathogen in a plant. In one embodiment of said aspect, optionally in combination with any of the embodiments provided above or below, the method comprises applying the strain as defined in the first aspect of the invention to the affected part of the plant and/or to the seed or to the substrate or soil used for growing said plant. In another embodiment, optionally in combination with any of the embodiments provided above or below, the method comprises applying the extract as defined in the third aspect of the invention to the affected part of the plant and/or to the seed or to the substrate or soil used for growing said plant. In a further embodiment, optionally in combination with any of the embodiments provided above or below, the method comprises applying the inoculation product as defined in the fourth aspect of the invention to the affected part of the plant and/or to the seed or to the substrate or soil used for growing said plant. In an even further embodiment, optionally in combination with any of the embodiments provided above or below, the method comprises applying the composition as defined in the fifth aspect of the invention, to the affected part of the plant and/or to the seed or to the substrate or soil used for growing said plant.

[0114] The dose may be adapted according to the composition of the fifth aspect of the invention and the formulation of the composition which is used and also according to the weather conditions, any resistance phenomena or other natural factors, the nature of the treatment or the degree of infestation, and according to the plants or sites to be treated.

[0115] In an embodiment of the eight aspect of the invention, optionally in combination with any of the embodiments provided above or below, the strain, the extract, the inoculation product or the composition is applied to plant nursery boxes, during seed treating, seed dressing, seed disinfection, seedling root dipping treatment, planting pit treatment, plant foot treatment, planting row treatment, surface spraying, soil incorporation, or by application to a water culture medium in hydroponic culture.

[0116] In an embodiment of the eighth aspect of the invention, optionally in combination with any of the embodiments provided above or below, the part of the plant treated is the seed. This treatment can be achieved by ordinary methods; for example, a method wherein seeds are dipped in the composition of the fifth aspect of the invention.

[0117] The treatment of the plant, i.e. root and/or the seeds, allows the bactericidal and fungicidal action of the strain of the invention.

[0118] The term “plant” comprises all plant species cultivated by humans, in particular those intended for food or for animal feed, such as cereals, fodder, vegetable, fruit crops, vines, aid/or for the supply of wood for all purposes (such as heating, housing construction furniture, and/or ornamentation). Example of plants include cereals (for example, rice, barley, wheat, rye, oat and corn), beans (for example, soybean, azuki bean, broad bean, peas and peanuts), fruit trees/fruits (for example, apples, pears, citruses, grapes, peaches, apricots, cherries, olive, nuts, almonds, bananas, berries and strawberries), vegetables (for example, tomato, cabbage, spinach, broccoli, lettuce, onion, garlic, leek and pepper), root crops (for example, potato, carrot, sweet potato, radish, lotus root and turnip), industrial crops (for example, cotton, hemp, paper mulberry, mitsumata, rape, beet, hop, sugarcane, sugar beet, rubber, coffee, tobacco, tea), pepos (for example, pumpkin, cucumber, watermelon, melon), pasture plants (for example, orchardgrass, sorghum, Thimothy-grass, clover, alfalfa), lawn grasses (for example, mascarene grass, bentgrass), crops for flavorings (for example, lavender, rosemary, thyme, parsley, basilica, mint, coriander, pepper, ginger), and flower plants (for example, chrysanthemum, rose, orchids).

[0119] The term “part of a plant” includes any segment of the plant, such as the root, stem, leaves and seeds.

[0120] The term “seed” includes what is called seeds, and also plant bodies for vegetative propagation such as bulbs, tubers and seed potato.

[0121] In an embodiment of the seventh or eighth aspects of the invention, optionally in combination with any of the embodiments provided above or below, the plant is tomato, or potato plant.

[0122] The term “substrate” comprises any support for cultivating a plant, and the material therefor is not particularly limited, as far as the plant can grow therein; for example, nursery mats, water, sand, soil, vermiculite, cotton, paper, diatomaceous earth, agar, gel substances, polymeric substances, rock wool, glass wool, wood chips, barks and pumice.

[0123] In an embodiment of the eighth aspect of the invention, optionally in combination with any of the embodiments provided above or below, the method of application is performed in the vicinity of the plant or a nursery bed for raising seedlings.

[0124] In an embodiment of the eighth aspect of the invention, optionally in combination with any of the embodiments provided above or below, the method of application is performed directly in the plant.

[0125] The examples below demonstrate the use of a strain of the invention as a bio-pesticide, in the control of bacterial and fungal infections.

[0126] In an embodiment of the seventh or eighth aspects of the invention, optionally in combination with any of the embodiments provided above or below, the use of the seventh aspect and the method of the eighth aspect are for controlling the colonization of pest of bacteria and/or fungi or treating infested plants. In particular, the invention relates to uses for controlling those plant pests. The term “treating” therefore is referred to infested plants. The term control comprises preventing infestations of the plants by said pests, repelling or eliminating said pests.

[0127] In an embodiment of the seventh or eighth aspects of the invention, optionally in combination with any of the embodiments provided above or below, the use of the seventh aspect and the method of the eighth aspect are for treating a plant infected by pest of bacteria and/or fungi.

[0128] In an embodiment of the seventh or eighth aspects of the invention, optionally in combination with any of the embodiments provided above or below, the bacteria are selected from the genus Xanthomonas, Pseudomonas and Erwinia.

[0129] In an embodiment of the seventh or eighth aspects of the invention, optionally in combination with any of the embodiments provided above or below, the bacteria are selected form the group consisting of Xanthomonas vesicatoria, Pseudomonas syringae, and Erwinia carotovora.

[0130] In an embodiment of the seventh or eighth aspects of the invention, optionally in combination with any of the embodiments provided above or below, the fungi are selected from the genus Rhizoctonia and Botrytis.

[0131] In an embodiment of the seventh or eighth aspects of the invention, optionally in combination with any of the embodiments provided above or below, the fungi are selected form the group consisting of Rhizoctonia solani and Botrytis aclada.

[0132] In an embodiment of the seventh or eighth aspects of the invention, optionally in combination with any of the embodiments provided above or below, the bacteria are selected from the genus Xanthomonas, Pseudomonas and Erwinia; and wherein the fungi are of the genus Rhizoctonia and Botrytis.

[0133] In an embodiment of the seventh or eighth aspects of the invention, optionally in combination with any of the embodiments provided above or below, the bacteria is selected from the genus Xanthomonas, Pseudomonas and Erwinia; or alternatively, it is selected from the group consisting of Xanthomonas vesicatoria, Pseudomonas syringae, and Erwinia carotovora; or alternatively, the fungi is of the genus Rhizoctonia and Botrytis; or, alternatively, it is selected from the group consisting of Rhizoctonia solani and Botrytis aclada; or, alternatively, the bacteria is selected from the genus Xanthomonas and the fungi is of the genus Rhizoctonia; or, alternatively, the bacteria is selected from the genus Xanthomonas and the fungi is of the genus Botrytis; or, alternatively, the bacteria is selected from the genus Pseudomonas and the fungi is of the genus Rhizoctonia; or, alternatively, the bacteria is selected from the genus Pseudomonas and the fungi is of the genus Botrytis; or, alternatively, the bacteria is selected from the genus Erwinia and the fungi is of the genus Rhizoctonia; or, alternatively, the bacteria is selected from the genus Erwinia and the fungi is of the genus Botrytis; or, alternatively, the bacteria is selected from the genus Xanthomonas and the fungi is Rhizoctonia solani and Botrytis aclada; or, alternatively, the bacteria is selected from the genus Pseudomonas and the fungi is Rhizoctonia solani or Botrytis aclada; or, alternatively, the bacteria is selected from the genus Erwinia and the fungi is Rhizoctonia solani or Botrytis aclada; or, alternatively, the bacteria is Xanthomonas vesicatoria, Pseudomonas syringae, or Erwinia carotovora and the fungi is of the genus Rhizoctonia; or, alternatively, the bacteria is Xanthomonas vesicatoria, Pseudomonas syringae, or Erwinia carotovora and the fungi is of the genus Botrytis; or alternatively, the bacteria is selected from the group consisting of Xanthomonas vesicatoria, Pseudomonas syringae, and Erwinia carotovora; and the fungi is selected from the group consisting of Rhizoctonia solani and Botrytis aclada; or alternatively, the bacteria is Xanthomonas vesicatoria and the fungi is Rhizoctonia solani: or alternatively, the bacteria is Xanthomonas vesicatoria and the fungi is Botrytis aclada; or alternatively, the bacteria is Pseudomonas syringae and the fungi is Rhizoctonia solani: or alternatively, the bacteria is Pseudomonas syringae and the fungi is Botrytis aclada; or alternatively, the bacteria is Erwinia carotovora and the fungi is Rhizoctonia solani; or alternatively, the bacteria is Erwinia carotovora and the fungi is Botrytis aclada.

[0134] In the present invention the term “infection” comprises asymptomatic infection or symptomatic infection of the plant caused by a nematode.

[0135] In an embodiment of the seventh or eighth aspects of the invention, optionally in combination with any of the embodiments provided above or below, the control can be performed in any plant such as potato or tomato plant.

[0136] A ninth aspect of the present invention relates to a kit comprising an effective amount of the strain as defined in the first aspect of the invention, or the extract as defined in the third aspect of the invention, or the inoculation product as defined in the fourth aspect of the invention, or the composition as defined in the fifth aspect of the invention.

[0137] All the embodiments provided above for the strain, the extract, the inoculation product and the composition are also embodiments of the kit of the ninth aspect of the invention.

[0138] In an embodiment of the ninth aspect of the invention, optionally in combination with any of the embodiments provided above or below, the kit may comprise a weekly, monthly, or other periodic dose of the strain of the first aspect of the invention. As an illustrative example, a kit comprising a weekly dose may comprise seven discrete compositions comprising the strain (seven daily doses). As another example, a kit comprising a monthly dose may comprise thirty compositions comprising the strain of the first aspect of the invention.

[0139] In case the strain of the first aspect of the invention is lyophilized, the kit of the ninth aspect of the invention can contain an edible resuspension agent, such as water.

[0140] In another embodiment of the ninth aspect of the invention, optionally in combination with any of the embodiments provided above or below, the kit comprises means to facilitate dosing compliance. For example, the kits may be particularly advantageous for the purpose of ensuring that the person who used it is performing the correct administration of the effective amount of the strain of the invention to the plant on the appropriately prescribed schedule. Blister cards or other containing devices appropriately configured may be particularly suitable for clearly illustrating sequence or timing of administration of the various components. The kit may be obtained as one card, or cases of four, six, seven (e.g., a weekly supply), or eight cards co-packaged together. Additionally, monthly or other types of kits may be obtained.

[0141] The kit that comprises the isolated strain, or the mutant, of the first aspect of the invention can comprise any means that allows the correct culture of the strain of the invention, such as culture medium, supplements or antibiotics, as well as instructions for the correct preparation and/or application to the plant.

[0142] A tenth aspect of the invention refers to the use of the kit of the ninth aspect of the invention for controlling an infection caused by bacterial pathogens and/or fungal pathogens in a plant.

[0143] All the embodiments provided above under the seventh and eighth aspects of the invention, regarding the particular infections and plants, among others, are also embodiments of the ninth and tenth aspects.

[0144] Throughout the description and claims the word “comprise” and variations of the word, are not intended to exclude other technical features, additives, components, or steps. Furthermore, the word “comprise” encompasses the case of “consisting of”. Additional objects, advantages and features of the invention will become apparent to those skilled in the art upon examination of the description or may be learned by practice of the invention. The following examples and drawings are provided by way of illustration, and they are not intended to be limiting of the present invention. Reference signs related to drawings and placed in parentheses in a claim, are solely for attempting to increase the intelligibility of the claim, and shall not be construed as limiting the scope of the claim. Furthermore, the present invention covers all possible combinations of particular and preferred embodiments described herein.

### EXAMPLES

### Example 1. Characterization of the Pseudomonas sp. Strain B2021 (CECT8708)

[0145] A. Genomic Characterization

[0146] B2021 Genome Sequencing

[0147] The B2021 whole genome shotgun sequence was obtained using the same methods applied previously for Lysobacter enzymogenes (Hernández, I. and C. Fernàndez. 2017. Draft genome sequence and assembly of a Lysobacter enzymogenes strain with biological control activity against root knot nematodes. Genome Announc 5(18): e00271-00217), which make use of standard high-throughput sequencing technology and bioinformatic analysis tools. In short, genomic DNA was extracted with a commercial kit (Quick-DNA Fungal/Bacterial kit; Zymo Research, Irvine, Calif. USA) following manufacturer's instructions. The DNA was submitted to a sequencing service provider (Genomix4Life, Baronissi, Italy) for library preparation (Nextera DNA library prep kit, Illumina, Cambridge, UK) and sequencing (2×150 paired-end mode) in a NextSeq500 device (Illumina). All library preparations and sequencing were performed according to supplier's specifications. The raw reads (raw data generated by the sequencing device) were trimmed for quality and length using Trim Galore! v0.4.0 (http://www.bioinformatics.babraham.ac.uk/projects/trim_galore/) and the trimmed reads were assembled using SPADes v3.5.0 (Bankevich, A., et al. 2012. SPAdes: a new genome assembly algorithm and its applications to single-cell sequencing. Journal of Computational Biology 19(5): 455-477). The assembled contiguous sequences (contigs) were filtered by their length and depth of coverage so contigs shorter than 200 nt or with coverage below 10-fold were discarded.

[0148] 16s Sequencing

[0149] The 16S rRNA gene sequencing was performed as described next. A PCR reaction mix, which consisted of 10 μL Phire Green Hot Start II Master Mix (Thermo Fisher Scientific), 0.8 μL primer 8f 10 μM (SEQ ID NO:2 5′-AGAGTTTGATCCTGGCTCAG-3′), 0.8 μL primer 1492r 10 μM (SEQ ID NO:3 5′-ACCTTGTTACGACTT-3′), 2 μL sample DNA and 6.4 μL nanopure water, was amplified according to the following program: 98° C. 5 min; 35 cycles of 98° C. 5 s, 58.5° C. 5 s and 72° C. 20 s, and 72° C. 20 s. The PCR product was purified using the EZNA Cycle Pure Kit (Omega Bio-Tek) according to manufacturer's instructions. The purified PCR product was sequenced by an external sequencing service (Secugen) using the primer 1492r (SEQ ID NO: 2) and the Sanger method with BigDye® Terminator v3.1 (Applied Biosystems) according to manufacturer's instructions.

[0150] The homology searches of the 16S gene were carried out using the BLAST suite (12, 13) (https://blast.ncbi.nlm.nih.gov/Blastcgi?PAGE_TYPE=BlastSearch). The applied parameters were those established by default except for the following:
[0151] Database: Nucleotide collection (nr/nt)
[0152] Organism: Pseudomonas (taxid: 286)
[0153] Limit to: Sequences from type material
[0154] Optimized for: Somewhat similar sequences (blastn)

TABLE 1
Homology searches results of the consensus sequence 16Sof B2021 in NCBI database.

| | Max | Total | Query | | | |
|---|---|---|---|---|---|---|
| Hit | Score | Score | cov. | E-val | Ident | Accession |
| Pseudomonas azotoformans strain LMG 21611 genome | 1822 | 9132 | 100% | 0.0 | 100% | LT629702.1 |
| assembly, chromosome: I | | | | | | |
| Pseudomonas sp. DSM 29167 16S ribosomal RNA gene, | 1822 | 1822 | 100% | 0.0 | 100% | KP756923.1 |
| partial sequence | | | | | | |
| Pseudomonas azotoformans strain NBRC 12693 16S | 1819 | 1819 | 100% | 0.0 | 99% | NR_113600.1 |
| ribosomal RNA gene, partial sequence | | | | | | |
| Pseudomonas sp. DSM 29164 16S ribosomal RNA gene, | 1817 | 1817 | 100% | 0.0 | 99% | KP756921.1 |
| partial sequence | | | | | | |
| Pseudomonas synxantha strain LMG 2190 genome | 1808 | 12486 | 100% | 0.0 | 99% | LT629786.1 |
| assembly, chromosome: I | | | | | | |
| Pseudomonas azotoformans gene for 16S ribosomal RNA, | 1808 | 1808 | 100% | 0.0 | 99% | LC130640.1 |
| partial sequence, strain: IAM 1603, clone: N3-903 | | | | | | |
| Pseudomonas azotoformans gene for 16S ribosomal RNA, | 1808 | 1808 | 100% | 0.0 | 99% | LC130639.1 |
| partial sequence, strain: IAM 1603, clone: C2-114 | | | | | | |
| Pseudomonas mucidolens strain LMG 2223 genome | 1804 | 9053 | 100% | 0.0 | 99% | LT629802.1 |
| assembly, chromosome: I | | | | | | |
| Pseudomonas mucidolens strain NBRC 103159 16S | 1804 | 1804 | 100% | 0.0 | 99% | NR_114225.1 |
| ribosomal RNA gene, partial sequence | | | | | | |
| Pseudomonas synxantha strain NBRC 3913 16S ribo- | 1804 | 1804 | 100% | 0.0 | 99% | NR_113583.1 |
| somal RNA gene, partial sequence | | | | | | |

[0155] The sequencing revealed a sequence (SEQ ID NO: 4). As shown in Table 1, the sequence was 100% identical to that of Pseudomonas azotoformans strain LMG 21611, and to that of a Pseudomonas sp. DSM29167 strain, and 99% identical to that of Pseudomonas azotoformans strain NBRC12693, Pseudomonas sp strain DSM29164, and to that of Pseudomonas synxantha strain LMG2190, among others.

[0156] rpoD, gyrA and gyrB Sequencing

[0157] The sequences of the rpoD, gyrA and gyrB genes were obtained from the genome of B2021 using the SEED Viewer browser within the RAST Annotation Server.

[0158] The homology searches of the rpoD, gyrA and gyrB genes were carried out as described in 16s sequencing section.

TABLE 2
Homology searches results of the gene sequence rpoD of B2021 (SEQ ID NO: 5) in the NCBI
database.

| | Max | Total | Query | | | |
|---|---|---|---|---|---|---|
| Hit | Score | Score | cov. | E-val | Ident | Accession |
| Pseudomonas fluorescens strain ATCC 13525 | 419 | 24157 | 100% | 4e-116 | 80% | LT907842.1 |
| genome assembly, chromosome: I | | | | | | |
| Pseudomonas azotoformans strain LMG 21611 | 414 | 13610 | 99% | 2e-114 | 79% | LT629702.1 |
| genome assembly, chromosome: I | | | | | | |
| Pseudomonas yamanorum strain LMG 27247 ge- | 410 | 39625 | 100% | 2e-113 | 79% | LT629793.1 |
| nome assembly, chromosome: I | | | | | | |
| Pseudomonas arsenicoxydans strain CECT 7543 | 161 | 5204 | 90% | 2e-38 | 69% | LT629705.1 |
| genome assembly, chromosome: I | | | | | | |
| Pseudomonas fragi strain NRRL B-727 ge- | 118 | 7111 | 95% | 2e-25 | 67% | LT629783.1 |
| nome assembly, chromosome: I | | | | | | |

[0159] As shown in table 2, when rpoD gene sequence of the strain of the invention B2021 was searched for homologies in the NCBI database, different species of Pseudomonas genus appeared. The ones which presented higher homology were P. fluorescens ATCC13525, P. azotoformans LMG21611, and the P. yarnanorum LMG2747.

TABLE 3
Homology searches results of the gene sequence gyrB of B2021 (SEQ ID NO: 6) in the NCBI
database.

| | Max | Total | Query | | | |
|---|---|---|---|---|---|---|
| Hit | Score | Score | cov. | E-val | Ident | Accession |
| Pseudomonas synxantha strain LMG 2190 | 3752 | 4364 | 100% | 0.0 | 94% | LT629786.1 |
| genome assembly, chromosome: I | | | | | | |
| Pseudomonas azotoformans strain LMG 21611 | 3667 | 4117 | 100% | 00 | 94% | LT629702.1 |
| genome assembly, chromosome: I | | | | | | |
| Pseudomonas fluorescens strain ATCC 13525 | 3517 | 4257 | 100% | 0.0 | 92% | LT907842.1 |
| genome assembly, chromosome: I | | | | | | |
| Pseudomonas extremaustralis strain DSM 17835 | 3508 | 3918 | 100% | 0.0 | 92% | LT629689.1 |
| genome assembly, chromosome: I | | | | | | |
| Pseudomonas yamanorum strain LMG 27247 ge- | 3494 | 3946 | 100% | 0.0 | 92% | LT629793.1 |
| nome assembly, chromosome: I | | | | | | |

[0160] GyrB gene was also analysed as rpoD and 16S rRNA, in this case, the sequences of this gene which exhibited higher identity to the one from the B2021 strain, belonged to five different species of Pseudomonas genus, P. synxantha LMG2190, the P. azotoformans LMG21611, the P. fluorescens ATCC13525, the P. extremaustralis DSM 17835, and the P. yarnanorum LMG27247 (Table 3).

TABLE 4
Homology searches results of the gene sequence gyrA of B2021 (SEQ ID NO: 7) in NCBI
database.

| | Max | Total | Query | | | |
|---|---|---|---|---|---|---|
| Hit | Score | Score | cov. | E-val | Ident | Accession |
| Pseudomonas azotoformans strain LMG 21611 | 4320 | 5226 | 100% | 0.0 | 96% | LT629702.1 |
| genome assembly, chromosome: I | | | | | | |
| Pseudomonas synxantha strain LMG 2190 | 4269 | 5004 | 100% | 0.0 | 96% | LT629786.1 |
| genome assembly, chromosome: I | | | | | | |
| Pseudomonas extremaustralis strain DSM 17835 | 4221 | 5372 | 100% | 0.0 | 95% | LT629689.1 |
| genome assembly, chromosome: I | | | | | | |
| Pseudomonas fluorescens strain ATCC 13525 | 4114 | 4872 | 100% | 0.0 | 94% | LT907842.1 |
| genome assembly, chromosome: I | | | | | | |
| Pseudomonas yamanorum strain LMG 27247 ge- | 4006 | 4805 | 100% | 0.0 | 93% | LT629793.1 |
| nome assembly, chromosome: I | | | | | | |

[0161] Finally, the results of the analysis of gyrA gene, went in the same direction, the closest sequences belonged to P. azotoformans LMG21611, P. synxantha LMG2190, P. extremaustralis DSM 17835, P. fluorescens ATCC13525, and the P. yarnanorum LMG27247 (Table 4).

[0162] Taking into account the results of this homology analysis, there were three species which were considered to be the more closely related with the strain of the invention that are P. fluorescens ATCC13525, the P. azotoformans LMG21611, and the P. yarnanorum LMG2747, as they appeared in the results of all the genes examined in the first five positions.

[0163] Average Nucleotide Identity (ANI) Calculation

[0164] The ANI, both ANIb (based on the BLAST algorithm) and the ANIm (based on the MUMmer algorithm) were calculated on the Jspecies web server (http://jspecies.ribohost.com/jspeciesws).

[0165] It should be noted that due to the nature of the algorithms used, the calculation of reciprocal ANIs can give slightly different values. However, these differences are usually inferiors to 0.1%.

[0166] The characteristics of the genomes used for the ANI calculation are provided in Table 5.

TABLE 5
Genome characteristics of the genomes compared in the study.

| Genome | Size (bases) | Contigs | GC (%) |
|---|---|---|---|
| B2021 | 6096505 | 124 | 60.3 |
| Pseudomonas fluorescens ATCC13525 | 6511547 | 1 | 60.0 |
| Pseudomonas azotoformans LMG21611 | 6727386 | 1 | 61.0 |
| Pseudomonas fluorescens NCTC10038 | 651517 | 1 | 60.0 |
| Pseudomonas yamanorum LMG27247 | 7087525 | 1 | 60.3 |
| Pseudomonas azotoformans S4 | 6859618 | 1 | 60.3 |
| Pseudomonas azotoformans F77 | 6581295 | 1 | 60.6 |

Contigs = contiguous sequence embedded from shorter sequences (reads) and which does not contain unknown nucleotides (gaps). A value of “124” means that the genome is fragmented into 124 pieces whose order is unkown.

[0167] For ANIb and ANIm calculations, the parameters used were those appearing by default in JSpecies web server. Results are shown in Tables 6 and 7, below.

[0168] As a control, the ANIb and ANIm values were calculated between Pseudomonas fluorescens ATCC13525 and Pseudomonas fluorescens NCTC10038. The results were ANIb 99.99% and ANIm 99.98% when using NCTC10038 as template and ANIb 100.00% and ANIm 99.98% when using ATCC13525 as the template. These results confirm that these two strains fulfil the criteria for deemed them to be from the same specie according to ANI calculation.

TABLE 6
ANIb values calculated from B2021 and the species
more closely related to it.

| | ANIb | Align | Align | Total |
|---|---|---|---|---|
| Genome | (%) | (%) | (bp) | (bp) |
| Pseudomonas azotoformans S4 | 86.40 | 73.28 | 4467287 | 6096505 |
| Pseudomonas azotoformans | 86.24 | 76.341 | 4654172 | 6096505 |
| LMG21611 | | | | |
| Pseudomonas azotoformans F77 | 86.11 | 74.96 | 4570190 | 6096505 |
| Pseudomonas fluorescens | 85.92 | 74.83 | 4561969 | 6096505 |
| ATCC13525 | | | | |
| Pseudomonas yamanorum | 84.26 | 74.32 | 4530941 | 6096505 |
| LMG27247 | | | | |

TABLE 7
ANIm values calculated from B2021 and the species
more closely related to it.

| | ANIm | Align | Align | Total |
|---|---|---|---|---|
| Genome | (%) | (%) | (bp) | (bp) |
| Pseudomonas azotoformans | 88.38 | 72.671 | 4430459 | 6096505 |
| LMG21611 | | | | |
| Pseudomonas azotoformans S4 | 88.26 | 71.71 | 4372062 | 6096505 |
| Pseudomonas azotoformans F77 | 88.31 | 71.54 | 4361686 | 6096505 |
| Pseudomonas fluorescens | 88.08 | 70.70 | 4310388 | 6096505 |
| ATCC13525 | | | | |
| Pseudomonas yamanorum | 87.16 | 66.05 | 4026497 | 6096505 |
| LMG27247 | | | | |

[0169] As shown in Tables 6 and 7, the highest ANI values between B2021 and any of the strains listed in Table 5 were 86.40% ANIb with P. azotoformans S4, and 88.38% ANIm with P. azotoformans LMG_21611, however, these values are below the threshold of 94-95% estimated for two strains to be deemed to be from the same species. That is, this indicates that the strain of the invention does not belong to any of the species tested, which were the most closely related according to the 16s rRNA and rpoD, gyrA, and gyrB genes.

[0170] B. Phenotypical Characterization

[0171] Materials and Methods

[0172] Temperature Range

[0173] To determine the optimum temperature for the growth of B2021, the strain was streaked on the surface of Nutrient agar plates that were then incubated at temperatures of 4° C., 18° C., 22° C., 25° C., 28° C., 30° ° C., 37° C. and 40° C. Bacterial growth was evaluated every day during 4 days of incubation.

[0174] pH Range

[0175] pH range of growth at 28° C. of B2021 strain was determined in sterile 96-well plates. For the experiment, B2021 was first grown overnight in LB. After that, 100 μL of bacterial suspension with a final optical density at 600 nm (OD600) of 0.01 were added to LB medium at following pHs: 3.46, 3.92, 4.26, 5.08, 7.03, 9.33, 10.04, 10.98. Then, 200 μL of B2021 isolate was inoculated for pH (2 wells per pH). The plates were read after 24 h of incubation at 28° C. To determine end points, several approaches were taken into account. Bacteria growth was evaluated by optical density at 620 nm (OD620) and cell viability was confirmed by addition of 30 μL of 0.01% resazurin. Any color changes from blue-purple to pink were recorded as positive.

[0176] Salinity Range

[0177] The effect of salinity on the rate of growth of B2021 strain at 28° C. was determined in sterile 96-well. For the experiment, B2021 was first grown overnight in LB. After that, 100 μL of bacterial suspensions with a final optical density at 600 nm (OD600) of 0.01 were added to the wells containing the following NaCl dilutions: 8, 6, 4, 3, 2, 1.5, 1, 0.75, 0.5, 0.375, 0.25 and 0%. The plates were read after 48 h of incubation at 28° C. To determine MIC end points, bacteria growth was evaluated by optical density at 620 nm (OD620). After that, cell viability was confirmed by addition of 30 μl of 0.01% resazurin. Any color changes from blue-purple to pink were recorded as positive.

[0178] Antibiotic Resistance

[0179] Minimum inhibitory concentrations (MICs) for tested antibiotics were determined by the broth microdilution (BMD) method. Four antibiotics were used: Streptomycin Sulfate, Nalidixic Acid, Oxytetracycline and Erythromycine. Briefly. MICs were determined in sterile 96-well plates by two-fold serial dilutions in 100 μL of LB. B2021 was first grown overnight in LB and, after that, 100 μL of bacterial suspension with a final optical density at 600 nm (OD600) of 0.05 were added to the wells containing the antibiotic dilutions, and the MIC plates were read after 18 h of incubation at 28° C. The MIC was defined as the lowest antibiotic concentration that inhibited 80% of growth (based on OD measurements) in comparison to the control. Moreover, cell viability was confirmed by addition of 30 μL of 0.01% resazurin. Any color changes from blue-purple to pink were recorded as positive and the MIC was defined as the lowest antibiotic concentration lacking this color change.

[0180] Apizym® and Api20NE®

[0181] Enzymatic activities were determined using APIZYM® and API20NE (bioMéneux, Madrid, Spain), following the manufacturer's instructions.

[0182] Results

[0183] The strain of the invention, B2021, has bacillus shape and Gram Negative Staining. Its pH range for growth is 4-10 and its temperature range for (growth is 4-30° C. so strain is mesophile and neutrophil (Table 8). The optimal temperature growth range is 28° C.-30° C. and does not grow at 37° C. B2021 is capable of growing from 0% to 4% of NaCl and it is considered a non halotolerant strain (Table 8). It shows more sensitivity to oxytetracycline and highly resistance to streptomycin sulfate (Table 8).

TABLE 8
Phenotypic characterization of B2021 strain.

| | | B2021 |
|---|---|---|
| | Temperature range (° C.) | 4-30° C. |
| | pH range | 4-10 |
| | Salinity range (%) | 0-4 |
| Antibiotic | Streptomycine Sulfate | 1600 μg/ml |
| resistance | Nalidixic Acid | 240 μg/ml |
| (MIC) | Oxytetracycline | 3.13 μg/ml |
| | Erythromycine | 240 μg/ml |
| Enzym | According to API ZYM | Alkaline phosphatase |
| production | | Esterase (C 4) |
| | | Leucine arylamidase |
| | | Acid phosphatase |
| | | Naphtol-AS-BI- |
| | | phosphohydrolase |
| | According to API 20NE | potassium nitrate |
| | | L-arginine |
| | | gelatin (bovine origin) |
| | | D-glucose |
| | | L-arabinose |
| | | D-mannose |
| | | D-mannitol |
| | | N-acetyl-glucosamine |
| | | potassium gluconate |
| | | capric acid |
| | | malic acid |
| | | trisodium citrate |
| | | oxidase test |
| | Siderophore Production | Positive |
| | Inhibition of Pathogen | 58% |
| | Biofilm | |

[0184] According to APIZYM®, B2021 produces several enzymes like Alkaline phosphatase, Esterase (C4), Leucine arylamidase, Acid phosphatase and, Naphthol-AS-BI-phosphohydrolase (Tables 8 and 9). On the other hand, B2021 strain gives positive results for 13 enzymes of API 20NE®, what means that it may produce them (Tables 8 and 10).

TABLE 9
APYZYM ® Results.

| | | | Intensity | |
|---|---|---|---|---|
| Well | Enzime assayed for | Substrate | value | Result |
| 1 | Control | — | 0 | − |
| 2 | Alkaline phosphatase | 2-naphthyl phosphate | 4 | + |
| 3 | Esterase (C 4) | 2-naphthyl butyrate | 3 | + |
| 4 | Esterase Lipase (C 8) | 2-naphthyl caprylate | 1 | − |
| 5 | Lipase (C 14) | 2-naphthyl myristate | 0 | − |
| 6 | Leucine arylamidase | L-leucyl-2-naphthylamide | 4 | + |
| 7 | Valine arylamidase | L-valyl-2-naphtylamide | 0 | − |
| 8 | Cystine arylamidase | L-cystyl-2-naphtylamide | 0 | − |
| 9 | Trypsin | N-benzoyl-DL-arginine- | 0 | − |
| | | 2-naphtylamide | | |
| 10 | α-chymotrypsin | N-glutaryl-phenylalanine- | 0 | − |
| | | 2-naphtylamide | | |
| 11 | Acid phosphatase | 2-naphtyl phosphate | 3 | + |
| 12 | Naphtol-AS-BI- | Naphtol-AS-BI-phosphate | 4 | + |
| | phosphohydrolase | | | |
| 13 | α-galactosidase | 6-Br-2-naphthyl-αD- | 0 | − |
| | | glucopyranoside | | |
| 14 | β galactosidase | 2-naphtyl-βD- | 0 | − |
| | | glucopyranoside | | |
| 15 | β-glucuronidase | Naphthol-AS-BI- | 0 | − |
| | | βD-glucuronide | | |
| 16 | α-glucosidase | 2-naphtyl-αD- | 0 | − |
| | | glucopyranoside | | |
| 17 | β-glucosidase | 6-Br-2-naphthyl-βD- | 0 | − |
| | | glucopyranoside | | |
| 18 | N-acetyl-β- | 1-naphthyl-N-acetil-βD- | 0 | − |
| | glucosaminidase | glucosaminido | | |
| 19 | α-mannosidase | 6-Br-2-naftil-αD- | 0 | − |
| | | mannopiranosido | | |
| 20 | α-fucosidase | 2-naftil-αL-fucopiranosido | 0 | − |

TABLE 10
APY20NE ® Results.

| Well | Test | Active ingredients | Reactions/Enzymes | Result |
|---|---|---|---|---|
| 1 | NO3 | potassium nitrate | reduction of nitrates | + |
| | | | to nitrites | |
| 2 | TRP | L-tryptophane | indole production | − |
| | | | (TRyptoPhane) | |
| 3 | GLU-Ferm | D-glucose | fermentation (GLUcose) | − |
| 4 | ADH (Arg) | L-arginine | Arginine DiHydrolase | + |
| 5 | URE | urea | UREase | − |
| 6 | ESC | esculin ferric | hydrolysis (E-glucosidase) | − |
| | | citrate | (ESCulin) | |
| 7 | GEL | gelatin (bovine | hydrolysis (protease) | + |
| | | origin) | (GELatin) | |
| 8 | PNPG | 4-nitrophenyl- | E-galactosidase | − |
| | | E D- | (Para-NitroPhenyl-βD- | |
| | | galactopyranoside | Galactopyranosidase) | |
| 9 | GLU_Assim | D-glucose | assimilation (GLUcose) | + |
| 10 | ARA | L-arabinose | assimilation (ARAbinose) | + |
| 11 | MNE | D-mannose | assimilation (ManNosE) | + |
| 12 | MAN | D-mannitol | assimilation (MANnitol) | + |
| 13 | NAG | N-acetyl- | assimilation (N-Acetyl- | + |
| | | glucosamine | Glucosamine) | |
| 14 | MAL | D-maltose | assimilation (MALtose) | − |
| 15 | GNT | potassium | assimilation (potassium | + |
| | | gluconate | GlucoNate) | |
| 16 | CAP | capric acid | assimilation (CAPric acid) | + |
| 17 | ADI | adipic acid | assimilation (ADIpic acid) | − |
| 18 | MLT | malic acid | assimilation (MaLaTe) | + |
| 19 | CIT | trisodium citrate | assimilation | + |
| | | | (trisodium CITrate) | |
| 20 | PAC | phenylacetic acid | assimilation | − |
| | | | (PhenylACetic acid) | |
| 21 | OX | oxidase test | cytochrome oxidase | + |

### Example 2: Siderophores Production of the Strain of the Invention

[0185] Materials and Methods

[0186] Production of ferric ion chelates was detected using Chrome Azurol S dye (CAS) methodology (Schwyn B. and Neilands J. B. “Universal chemical assay for the detection and determination of siderophores.” Anal Biochem, (1987) 160(1): 47-56) with some modifications. CAS solution was made by dissolving 60.5 mg CAS powder (Sigma-Aldrich) in 50 mL distilled water and 10 mL of Fe(III) solution (1 mM FeCl3.6H2O, 10 Mm HCl) were added. Under stirring this solution was slowly mixed with 72.9 mg hexadecyltrimethylammonium bromide (HDTMA, Sigma-Aldrich), dissolved in 40 mL water and the resultant dark blue solution was autoclaved to sterilize and stored in the dark.

[0187] To determine siderophore production, overnight bacterial cultures were grown at 28° C. for 24 h on King B plates (20 g/L casein peptone, 1.5 g/L K2HPO4, 1.5 g/L MgSO4.7H2O, 10 ml glycerol, and 15 g/L agar) containing 1/10 of CAS solution previously prepared.

[0188] Results

[0189] Siderophores, small extracellular compounds that form complexes with available iron, are involved in biocontrol activity. Siderophores are able to sequester the limited iron pool in the rhizosphere competing with phytopathogens which also require iron to grow. Following CAS assay in agar media, the inventors determined that B2021 was able to produce siderophores. CAS assays showed the change of dark blue to orange color after incubation with this bacterium, while no change was observed after incubation with other bacteria that do not produced siderophores.

### Example 3. Characterization of Cell-Fee Culture Supernatants (CS) Obtained from the Strain of the Invention

[0190] A. Absorbance and HPLC Analysis

[0191] Materials and Methods

[0192] Since the most closely related specie to the strain of the invention, according to the genomic analysis, was the Pseudomonas azotoformans, the characterization of the cell-free culture supernatant (CS) obtained from B2021 strain was performed comparing it to the supernatant obtained by the collection of Pseudomonas azotoformans strain DSM 18862. The characterization was focused on production of siderophores and other metabolites.

[0193] Both strains were grown in liquid culture medium KingBmod with lower content of iron (5 g/l acid casein peptone, 1.2 g/L K₂HPO₄, 0.25 g/L MgSO4.7H₂O, 0.03 g/L ZnSO₄.7H₂O) or in the same medium supplemented with 200 μM FeCl3. After incubation in darkness at 28° C. 170-200 rpm for 1 day, cell-free culture supernatants (CS) were obtained by centrifugation at 4000 g and filtration through a 0.22 μm pore size filter. To confirm that the supernatants were free of bacterial cells, aliquots of 100 μL were plated in nutritive agar (AN) and absence of growth was confirmed after incubation at 26° C. for 2 days.

[0194] The siderophore production in CS was visualized by fluorescence and their UV spectra were measured in a micro-volume spectrophotometer (DS-11 FX, Denovix). CS samples were also analysed by HPLC (eAlliance system, Waters, Milford, Mass.). Chromatograms were performed using an XBridge C18 reversed-phase column (5 μm 4.6×150 mm, Waters) eluted at 1 mL/min with a mobile phase mixture of solvents A [H2O+0.05% trifluoracetic acid (TFA)] and B (CH3CN+0.05% TFA). The elution gradient was 0-10% B 10 min, 10-40% B 10 min, 40-100% B 3 min, 100% B 2 min, 0% B 5 min. Siderophores and other metabolites were detected by UV spectroscopy with a photodiode array detector and chromatograms were obtained by processing at 254 nm.

[0195] Results

[0196] Both cultures obtained from B2021 and DSM 18862 were fluorescent and had a peak of absorbance at 400-420 nm indicating the production of fluorescent siderophores, such as pyoverdine-type siderophores produced by Pseudomonas spp. These compounds were not produced when the culture medium was supplemented with iron. The peaks corresponding to siderophores and other metabolites were characterized by HPLC (FIGS. 2A and 2B). Siderophore peaks were only observed after incubation of bacteria in medium without iron.

[0197] B. Surfactant Activity

[0198] Materials and Methods

[0199] Cell-free culture supernatants were obtained as described in the former section. The surfactant activity or the ability to collapse a droplet of water was tested as described by Kuiper et al (Kuiper I. et al., “Characterization of two Pseudomonas putida lipopeptide biosurfactants, putisolvin I and II, which inhibit biofilm formation and break down existing biofilms”. Mol Microbiol, 2004, 51: 97-113). Briefly, 20 μL of cell-free culture supernatants were pipetted as a droplet onto parafilm. Subsequently, 3 μL of the dye Congo Red (which had no influence on the shape of the droplets) was added to stain the water and supernatants for photographic purposes. The spreading of the droplet on the parafilm surface was followed over hours until the droplet became dry and the diameter of the dried droplet was recorded.

[0200] Results

[0201] As shown in table 11, only the CS obtained from B2021 displayed surfactant activity.

TABLE 11
Surfactant activity of CS of B2021 and DSM18862 strains.

| Samples | Area (mm²) |
|---|---|
| H₂O | 7.1 ± 0.0 |
| KingBmod (control medium) | 2.0 ± 1.7 |
| B2021_KingBmod Bach 1 | 38.5 ± 0.0 |
| B2021_KingBmod Bach 2 | 33.4 ± 7.2 |
| DSM18862_KingBmod Bach 1 | 7.1 ± 0.0 |
| DSM18862_KingBmod Bach 2 | 3.1 ± 0.0 |

### Example 4: Inhibitory Activity of the Strain of the Invention

[0202] A. Inhibition of Pathogen Biofilm of Xanthomonas vesictoria

[0203] Materials and Methods

[0204] Inhibition of biofilm production of DSM 50861 Xanthomonas vesicatoria was determined in sterile 96-well plates at 28° C. For the experiment, X. vesicatoria and B2021 were first grown overnight in LB at 28° C. on a rotary shaker. Next day, X. vesicatoria culture was diluted into fresh LB to give an OD600 of 0.1. Sterile untreated 96-well microtiter plates were inoculated with 100 μL of X. vesicatoria suspension and 100 μL of free call supernatant of B2021 which was obtained as provided in Example 3 above, but using LB medium instead of KingBmod. Thus, briefly, the free cell supernatant was obtained with a O/N culture comprising LB, at 28° C. and 200 rpm; the supernatant was centrifuged at 5000 g and filtered through a 0.22 μm pore size filter. As a control, 100 μL of supernatant of X. vesicatoria were added to the wells without B2021 supernatant. The plates were read after 72 h of incubation at 28° C. After incubation optical density of plates were read at 620 nm using a plate reader (Multilabel Plater Reader HALO LED96, Dynamica). After that, biofilm were stained with crystal violet 0.1% and diluted with ethanol in order to obtain its optical density at 620 nm. Biofilm production was reported as Relative Biofilm that is the relation of OD of biofilm staining with crystal violet at 620 nm divided by OD at 620 nm of initial cell growth. The results were expressed as the percentage of inhibition compared with the negative control.

[0205] Results

[0206] Microbial biofilm is an aggregate of cells that have organized tissue behavior. Biofilm begins with cell adhesion on a living or inert surface such as a catheter or xylem or phloem from vegetables. It is an important characteristic during microbial colonization and survival in unfavorable environments. Phytopathogen bacteria use to be high biofilm producers because they need it to adhere to the plant to colonize and infect it.

[0207] As mentioned above, the strain DSM 50861 Xanthomonas vesicatoria was incubated with B2021 supernatant and its own supernatant being the negative control. Results showed that X. vesicatoria in presence of its own supernatant may produce biofilm but the presence of B2021 supernatant inhibits biofilm formation (Table 8 and FIG. 1). Supernatant of B2021 strain causes 58.13% of biofilm formation inhibition of X. vesicatoria biofilm formation, that is, it could prevent plant infections.

[0208] B. Antifungal Activity Against Rhizoctonia solani

[0209] Material and Methods

[0210] Two bioassays were performed to assess the biological control activity of B2021 on Rhizoctonia solani in potato plants. Both trials were carried on 28 days-old plants in a walk-in growth chamber (Fitoclima 20000®, ARALAB) set at 20/18° C. (day/night), 60-70% relative humidity, and a photoperiod of 13/11 h (day/night) with ca 300 μmol·m⁻²·s⁻¹ of photosynthetically-active radiation.

[0211] Potato (Solanum tuberosum) tubers cultivar “Red Pontiac” were forced to sprout for a period of 2-4 weeks in the dark and then disinfected in a solution of 2% commercial bleach for 10 min, washed with 70% ethanol, and rinsed with sterile tap water. After wiping, potatoes were planted in 1-L containers with sterile substrate (sand:peat:perlite; 4:2:1; v:v:v) and let grow in the growth chamber for 4 weeks. There were 4 different treatments in each bioassay:
[0212] 1) Negative Control: 10 plants without pathogen (30 mL of sterile water was applied to each plant and application time)
[0213] 2) Positive Control: 10 plants inoculated with R. solani strain DSM 63010 by applying 30 mL plant of a suspension with the pathogen to the substrate at the shoot base. The pathogen solution (0.5 L) was prepared from 4 plates sown with R. solani in PDA and grown for 2 weeks at 26° C. and used for treatments 2, 3 and 4.
[0214] 3) Biological Control Plants inoculated with the pathogen (R. solani strain DSM 63010) as before and treated 3 times (days 2, 9, and 15 after transplant) with Actinovate® SP [active ingredient 1×10⁷ CFU/g Streptomyces lydicus strain WYEC108 0.0371% (w:v)] applied at 0.6%-1.0% following manufacturer's instructions (Novozymes) (Table 5)
[0215] 4) B2021 treatment Plants inoculated with the pathogen (R. solani strain DSM 63010) as before and treated with strain B2021 “Technical Grade Active Ingredient” (consisting of freeze dried material composed of 30% w/w of viable cells and 70% w/w sucrose; TGAI) 2 times (days 2 and 15 after transplant) in Bioassay 1.1, or 3 times (days 2, 9, and 15) in Bioassay 1.2.

TABLE 12
Experimental design of two in vivo growth chamber bioassays to assess efficacy of B2021-
TGAI to control Rhizoctonia solani in potato plants.

| | | | Day 2 | Day 9 | Day 15 | |
|---|---|---|---|---|---|---|
| | | Day 0 | 1st | 2nd | 3rd | Day 23 |
| | | Pathogen | Application | Application | Application | End of |
| Bioassay | Treatment | inoculation* | (curative) | curative) | (curative) | the trial |
| 1.1. | B2021- | ✓ | 2.70 10⁷ | — | 1.12 10⁷ | ✓ |
| | TGAI | | | | | |
| 1.2. | B2021- | ✓ | 3.70 10⁶ | 3.20 10⁶ | 1.25 10⁶ | ✓ |
| | TGAI | | | | | |

*at trasplant

[0216] Twenty-three days after transplantation the plants were harvested, rinsed with tap water and scored for disease incidence (percent age of damaged plants per treatment) and severity (percentage of stem canker). After verifying data homooedasticity and normality, ANOVA and LSD posthoc tests were performed. Differences were considered statistically significant at P<0.05. All statistical analyses were performed with R.

[0217] Results

[0218] The potato plants inoculated with the fungus Rhizoctonia solani and treated 2-3 times with 62021-TGAI showed a significant reduction in the percentage of seventy of the disease compared with the positive control and the biological control (Table 13 below). The results obtained in these assays showed that B2021-TGAI have a fungicidal activity. As shown in table G, the effect of the treatment with the strain of the invention was even more effective than the positive biological control used in the assays.

TABLE 13
Efficacy on the percentage of severity B2021-TGAI on potato inoculated plants with Rhizactonia solani
compared with a negative control (plants without pathogen), a positive control (plants inoculated
with pathogen), and a biological control (plants inoculated with the pathogen
and treated with a commercial product) in two in vivo growth chamber bioassays.

| | | | Average | | Efficacy on |
|---|---|---|---|---|---|
| | | Number | 3 applications | Percentage of | Percentage of |
| Bioassay | Treatments | of applications | (CFU/mL) | Severity (%) | Severity (%) |
| 1.1. | Negative Control | | — | 0 | — |
| | Positive Control | | — | 64 a | — |
| | Biological Control* | 3 (A, B, C) | 0.6 × 10⁵ | 46 ab | 28 b |
| | B2021-TGAI | 2 (B, C) | 1.9 × 10⁷ | 33 b | 48 a |
| 1.2. | Negative Control | | — | 0 c | — |
| | Positive Control | | — | 47 a | — |
| | Biological Control* | 3 (A, B, C) | 1.0 × 10⁵ | 23 b | 51.06 a |
| | B2021-TGAI | 3 (A, B, C) | 1.9 × 10⁷ | 18 b | 61.70 b |

*Biological Control: ACTINOVATE applied 3 times (A, B, C) at 0.6% or 1% (commercial dose)

[0219] C. Antibacterial Activity Against Erwinia carotovora

[0220] Material and Methods

[0221] Four bioassays were performed to assess the biological control activity of strain B2021 against Erwinia carotovora on potato plants. All efficacy bioassays were performed in a walk-in growth chamber (Fitoclima 20000®, ARALAB) set up with the same conditions than in Example 4B.

[0222] Potato (S. tuberosum) tubers cultivar “Kennebec” were induced to sprout and disinfected as described for the potato—R. solani pathosystem (Example 4B). The most healthy sprouts were planted in peat:vermiculite (1:1; v:v) and let grow for 4 weeks in the growth chamber. Then, the plantlets were transplanted to 1-L pots with soil:peat:perlite (2:1:0.5; v:v:v). There were 2 different treatments in each bioassay (since no effective chemical control treatment is available for this bacterial disease, no chemical treatment was included in this pathosystem) with the following design (Table 14):

[0223] Bioassay 2.1. and 2.2.
[0224] 1) Positive control: 8-12 plants were challenged with the pathogen (E. carotovora sbsp. atroseptica strain DSM 34184) one day after transplantation by adding 20 μL of the pathogen bacterial suspension, at 10⁸ CFU·mL·⁻¹ from an overnight culture in LB medium at 28° C., into an artificial wound at the base of the shoot.
[0225] 2) 82021-TGAI: 8-12 plants were inoculated with the pathogen (E. carotovora strain DSM 34184) as in the positive control, and treated with strain B2021-TGAI 3 times (day 0, 7, 14) as depicted in table 6, into the soil at the base of the shoot.

[0226] Bioassay 2.3. and 2.4.

[0227] 1) Positive control: 8-12 plants were challenged with the pathogen as in the positive control of 2.1 and 2.2 bioassays.

[0228] 2) B2021-OD: 8-12 plants were inoculated with the pathogen (E. carotovora strain DSM 34184) as with the positive control and treated with strain B2021 formulated as “Oil Dispersion” (B2021-OD) 3 times (day 0, 7, 14), into the soil at the base of the shoot (the formulation consisted of 100 g TGAI suspended in a vegetable oil used as carrier (790 g soybean oil) and supplemented with surfactants (75 g alcohol, C12-13, ethoxylated and 25 g glycerol mono oleate) and anticaking agent (10 g silicon)).

TABLE 14
Experimental design of four in vivo growth chamber bioassays to assess efficacy of B2021-
TGAI or B2021-OD to control Erwinia carotovora in potato plants.

| | | Day 0 | | Day 7 | Day 14 | |
|---|---|---|---|---|---|---|
| | | 1st | | 2nd | 3rd | |
| | | Application | Day 6 | Application | Application | Day 21 |
| | | (preventive) | Pathogen | (curative) | (curative) | End of |
| Bioassay | Treatment | (CFU/mL) | Inoculation | (CFU/mL) | (CFU/mL) | the trial |
| 2.1. | B2021- | 1.30 10⁸ | ✓ | 8.30 10⁷ | 1.22 10⁸ | ✓ |
| | TGAI | | | | | |
| 2.2. | B2021- | 3.50 10⁶ | ✓ | 5.00 10⁷ | 6.10 10⁶ | ✓ |
| | TGAI | | | | | |
| 2.3. | B2021-OD | 4.20 10⁷ | ✓ | 4.20 10⁷ | 6.60 10⁷ | ✓ |
| 2.4. | B2021-OD | 5.70 10⁷ | ✓ | 4.20 10⁷ | 5.90 10⁷ | ✓ |

[0229] Twenty-one days after transplantation plants were scored for bacterial soft rot severity (expressed as percentage of necrotic vascular lesion). After verifying data homoscedasticity and normality, ANOVA and LSD posthoc tests were performed. Differences were considered statistically significant at P<0.05. All statistical analyses were performed with R.

[0230] Results

[0231] The potato plants inoculated with the bacterium Erwinia carotovora and treated 3 times with B2021-TGAI or B2021-OD formulation showed a significant reduction in the percentage of severity of the disease compared with the positive control (Table 15 below). The results obtained in these bioassays showed that the strain of the invention have bactericidal effect when presented in all the formulation tested.

TABLE 15
Efficacy on the percentage of severity of P. azotoformans B2021-TGAI and B2021-OD Formulation, on
potato plants inoculated with Erwinia amylovora compared with a positive control (plants inoculated
with the pathogen) in four in vivo growth chamber bioassays.

| | | Average | | Efficacy on |
|---|---|---|---|---|
| | | 3 applications | Percentage of | Percentage of |
| Bioassay | Treatments | (CFU/mL) | Severity (%) | Severity (%) |
| 2.1. | Positive Control | — | 38.75 a | — |
| | B2021-TGAI | 1.12 10⁸ | 17.41 b | 55.11 |
| 2.2. | Positive Control | — | 57.13 a | — |
| | B2021-TGAI | 1.99 10⁷ | 23.88 b | 58.21 |
| 2.3. | Positive Control | — | 44.82 a | — |
| | B2021-OD | 5.00 10⁷ | 7.91 b | 82.58 |
| 2.4. | Positive Control | — | 47.59 a | — |
| | B2021-OD | 5.27 10⁷ | 24.08 a | 49.00 |

[0232] D. Antibacterial Activity Against Pseudomonas syringae

[0233] Material and Methods

[0234] Two bioassays were performed to assess the biological control activity of strain B2021 against Pseudomonas syringae pv tomato on tomato plants. All efficacy bioassays were performed on 21 days old plants performed in a walk-in growth chamber (Fitoclima 20000®, ARALAB) set up with the same conditions than in Example 4B.

[0235] Tomato (S. lycopersicum) cultivar “Cuarenteno” plantlets were transplanted to 1-L pots with soil:peat:perlite (2:1:0.5; v:v:v). Then, plants were inoculated with O/N culture of Pseudomonas syringae pv tomato B2168 (DSM 50315) grown on King B (10E+08 UFC/mL). Leaves were sprayed until run-off and covered with a plastic bag. After 48 h inoculation plants were treated with B2021 and let grow in the growth chamber for 1 week. There were 4 different treatments in each bioassay:
[0236] 1) Positive Control (Bioassays 3.1 and 3.2): 9-10 plants were inoculated with Pseudomonas syringae strain DSM 50315 by applying 10 mL of a suspension with the pathogen to the leaves. The pathogen solution was prepared from O/N culture on king B medium at 28° C. and used for treatments 1, 2, 3 and 4.
[0237] 2) Chemical Control (Bioassays 3.1 and 3.2): Plants were inoculated with the pathogen (Pseudomonas syringae strain DSM 50315), as in the positive control, and treated once (2 days after transplant) with Cuproflow® (Dicopper chloride trihydroxide 38% [SC] P/V) applied at 0.3% following manufacturer's instructions (Isagro S.P.A)
[0238] 3) B2021 treatment Plants were inoculated with the pathogen (Pseudomonas syringae strain DSM 50315) and treated with strain B2021 TGAI (Bioassay 3.1) or B2021-OD once, 2 days after transplant (Bioassays 3.1 and 3.2).

TABLE 16
Experimental design of two in vivo growth chamber bioassays to
assess efficacy of B2021-TGAI and B2021-OD to control
Pseudomonas syringae in tomato plants.

| | | | Day 2 | |
|---|---|---|---|---|
| | | Day 0 | 1^{st} Application | Day 9 |
| | | Pathogen | (curative) | End of |
| Bioassay | Treatment | Inoculation* | (CFU/mL) | the trial |
| 3.1. | B2021-TGAI | √ | 1.2E+08 | √ |
| 3.1. | B2021-OD | √ | 2.0E+08 | √ |
| 3.2. | B2021-OD | √ | 3.9E+07 | √ |

*At transplant

[0239] Nine days after transplantation plants were scored for bacterial speck disease of tomato severity (expressed as percentage leaf affected). After verifying data homoscedasticity and normality, ANOVA and LSD posthoc tests were performed. Differences were considered statistically significant at P<0.05. All statistical analyses were performed with R.

[0240] Results

[0241] The tomato plants inoculated with the bacterium Pseudomonas syringae and treated once with B2021-TGAI or B2021-OD formulation showed a significant reduction in the percentage of severity of the disease compared with the positive control and the chemical reference (Table 17 below). The results obtained in these bioassays showed that B2021-TGAI and B2021-OD have a bactericidal activity.

TABLE 17
Efficacy on the percentage of severity of B2021-TGAI and B2021-OD,
on tomato plants inoculated with Pseudomonas syringae compared with
a positive control (plants inoculated with the pathogen) and a chemical
control (plants inoculated with the pathogen and treated with a
commercial chemical product) in two in vivo growth chamber bioassays.

| | | | | Efficacy on |
|---|---|---|---|---|
| | | Application | Percentage of | Percentage of |
| Bioassay | Treatments | (CFU/mL) | Severity (%) | Severity (%) |
| 3.1. | Positive Control | | 16.7 | |
| | Chemical Control* | | 9 | 46% |
| | B2021-TGAI | 1.2E+08 | 9.3 | 44% |
| | B2021-OD | 2.0E+08 | 11.5 | 31% |
| 3.2. | Positive Control | | 11.4 | |
| | Chemical Control* | | 2.3 | 79% |
| | B2021-OD | 3.9E+07 | 6.6 | 42% |

*Cuproflow 0.3% (Dicopper chloride trihydroxide 38%)

[0242] E. Antimicrobial Activity of the Cell Free Extract of the Strain of the Invention.

[0243] Materials & Methods

[0244] Antibacterial activity of the cell free extract obtained from the strain of the invention was evaluated against the bacteria Pseudomonas syringae strain B2168 (DSM50315), and Erwinia carotovora strain B2169 (DSM 30184) and using a microtiter plate assay (López-Garcia B. et al., “Identification of Novel Hexapeptides Bioactive against Phytopathogenic Fungi through Screening of a Synthetic Peptide Combinatorial Library”. Appl Environ Microbiol, 2002, 68: 2453-2460). Pathogenic bacteria were overnight cultured in LB medium at 28° C. and 200 rpm. The absorbance of the stationary cultures was measured and adjusted to 0.01 with LB medium. The assay mixture contained 100 μl of bacteria suspension at 0.01 of absorbance and 100 μl of CS obtained from the strain of the invention as described in example 3A (tests), or H₂O as control. Plates were incubated at 26° C. for 1 day and bacterial growth was determined by measuring optical density at 600 nm (OD600) in a HALO LED96 microplate reader (Dynamica). The percentage of growth inhibition was calculated as follow:

% inhibition=100−((Abs test)/(Abs control)×100).

[0245] Antifungal activity of the cell free extract obtained from the strain of the invention was evaluated against the fungus Sclerotinia sclerotiorum strain H886 (which forms part of Futureco Bioscience collection) by the Poisoned Food technique. A solution of the CS obtained by strain B2021 as described in example 3A, was pipetted aseptically into temperate PDA to reach a final concentration of 10%. Then, the medium was poured into 9 cm Petri plates and, after solidification, agar discs (6 mm diameter) containing mycelium from the active growing edge of 7 days-old cultures of the pathogenic strain were placed on the center of each plate. Each treatment was done by triplicate. Plates were incubated at 26° C. in the dark and the radial mycelial growth of fungal colony was followed by measurement of the shorter and longer radius at different days. The in vitro fungal growth on PDA plates poisoned with the CS produced by B2021 was compared with the fungal growth on control plates (PDA alone).

[0246] Results

[0247] As shown in table 18, cell-free supernatant of the strain of the invention showed antimicrobial activity. Moreover, CS obtained by bacteria incubated in culture medium with iron showed lower or no inhibition, that is, their antagonistic activity is partially due to the siderophores, which they produce and secrete.

TABLE 18
Antimicrobial activity of CS of B2021 against the phytopathogenic
fungus Sclerotinia sclerotiorum, and the bacteria Pseudomonas
syringae, and Erwinia carotovora.

| | % inhibition | |
|---|---|---|
| Phytopathogens | KingBmod | KingBmod + Fe |
| Sclerotinia sclerotiorum | 41.3 ± 7.9 | 5.4 ± 7.7 |
| Pseudomonas syringe | 69.0 ± 0.9 | 19.5 ± 2.4 |
| Erwinia carotovora | 44.0 ± 0.7 | 5.6 ± 4.6 |

[0248] F. Antifungal Activity Comparative Assay

[0249] Materials & Methods

[0250] Fungal inhibition tests were performed against the phytopathogen Botrytis aclada strain H16 (CECT2851) by the Poisoned Food technique. A solution of the CS obtained by strain B2021 or the Pseudomonas azotoformans strain DSM 18862 was pipetted aseptically into temperate PDA to reach two final concentrations, 10% and 50%. Then, the medium was poured into 9 cm Petri plates and, after solidification, agar discs (6 mm diameter) containing mycelium from the active growing edge of 7 days-old cultures of the pathogenic strain were placed on the center of each plate. Each treatment was done by triplicate. Plates were incubated at 26° C. in the dark and the radial mycelial growth of fungal colony was followed by measurement of the shorter and longer radius at different days. The in vitro fungal growth on PDA plates poisoned with the CS produced by B2021 or DSM 18862 was compared with the fungal growth on control plates (PDA alone).

[0251] Results

[0252] The inventors found that both cell-free supernatants obtained from B2021 and DSM 18862 showed antifungal activity. Moreover, as described in Example 4E, the antagonistic activity was dependent on the siderophore production capacity by the strain of the invention and DSM strain (Table 19).

[0253] Remarkably, the CS obtained from the strain of the invention cultured in a media containing Iron (B2021_KingBmod+Fe), although showing a lower effect, had also antifungal activity, suggesting that not only the siderophores produced are the responsible for the antagonistic activity. This effect is more relevant at higher doses of CS (i.e. 50%)

[0254] Moreover, the CS obtained from the strain of the invention, B2021, had higher antifungal activity compared with the collection bacterium DSM 18862. This higher effect may be explained by the production of other metabolites by B2021 strain, such as the ones that confers to the CS the surfactant activity (Table 11 and FIG. 3).

TABLE 19
Antifungal activity of CS of B2021 and DSM18862 strains against
the phytopathogenic fungus Botrytis aclada.

| | % inhibition | |
|---|---|---|
| Cell-free culture supernatants (CS) | 10% | 50% |
| B2021_KingBmod | 32.1 ± 9.1 | 94.5 ± 0.9 |
| B2021_KingBmod + Fe | 11.4 ± 3.7 | 77.2 ± 3.8 |
| DSM18862_KingBmod | 27.0 ± 1.9 | 88.7 ± 26.6 |
| DSM18862_KingBmod + Fe | 1.3 ± 2.2 | 77.1 ± 4.4 |

### Example 5. Industrial Scale Production of a Composition of the Invention

[0255] For industrial scale production of compositions with the strain of the invention, optimal fermentation conditions described below using a 14 L bioreactor in liquid medium can be used, although techniques based on solid media fermentation may also be used, all of them being standard methods used in the microbiological industry.

[0256] In order to determine the optimal conditions, a 14 L Eppendorf bioreactor was used with 10 L GYM medium at 30° C., pH 7,0, pO2>50% ramp, and stirring at 200-400 rpm. An exponential culture of the Pseudomonas sp. CECT8708 was inoculated at 5% v/v and the operational parameters of the bioreactor were monitored, the growth ending in steady phase in 8 h and getting cellular concentrations of 2.0×10⁹ CFU/mL. Then, the culture was centrifuged in Hanil Biomed/J1250 centrifuge at 5000 g and cells were collected aseptically. At the end of this step, the biomass was concentrated by resuspending in 500 mL buffer, obtaining about 1 litres of 4×10¹⁰ CFU/mL concentrate. An inert osmotic protector ingredient (1 L) was added later to the concentrate and dehydrated in a Heto Power Dry LL 3000 lyophiliser under standard conditions for 72 h, obtaining about 70 g dry weight (30% active material), with a concentration of 1.2×10¹¹ CFU/g p.s. In such conditions a product with a cell viability close to 90%, stable, easy to store and handle is obtained, which at operational doses of 5×10⁷ CFU/mL allows the preparation of about 140 L of a product ready to be applied on the crop plants to be protected. Subsequently, the material was packaged in vacuum sealed bags, and preserved at 4° C., which maintains its shelf life for more than one year.

### Example 6. Evaluation of Acute Oral Toxicity of the Strain of the Invention in Rats

[0257] Species: Wisatr Rat RjHan: WI, 8 weeks of age.

[0258] 16 animals (8 female and 8 male)

[0259] Distribution: 2 males and 2 females in four groups: control day 3, control day 21, Pseudomonas azotoformans day 3 and Pseudomonas azotoformans day 21

[0260] Acclimatization period: 12 days before experimental phase

[0261] Animals were administered once by oral gavage previous a fasting period. After that, animals were observed periodically during the first 24 hours.

[0262] Body weight was registered once a week and at the end of the study. Animals were observed during 21 days after which they were euthanized with sodium pentobarbital and necropsy was performed (expect on groups euthanized on day 3)

[0263] Test Item Administration

[0264] Route: oral, by gastric gavage

[0265] Frequnc: single administration

[0266] Volume: 1 ml

[0267] Administered dose: 2.53×10⁸ CFU/ml=CFU/animal

[0268] No animals died during the study. No treatment-related clinical signs were found during the development of the study

[0269] All animals gained weight during experimental phase

[0270] No colony forming units were observed in any of the tissues organs and body fluids of control and treated rats on days 3 or 21 after administration

[0271] It was concluded that the test item Pseudomonas azotoformans does not cause adverse effects in rodents. The test item was cleared from bodied during first 3 days following administration without causing any adverse effect

### REFERENCES CITED IN THE APPLICATION

[0272] Arahal et al., Methods in Microbiology, Chapter 6, Whole genome analysis: Average Nucleotide Identity, Vol. 41 ISSN 0580-9517.
[0273] Xiang N et al. “Biological control of Meloidogyne incognita by Spore-forming Plant Growth-promoting Rhizobacteria on Cotton” Plant Disease 2017(101):774-784.
[0274] Sambrook, J. and Russell, D. W. “Molecular Cloning: A Laboratory Manual”, Chapter 13, “Mutagenesis”, Cold Spring Harbor, 3rd Ed, 2001.
[0275] Schwyn B. and Neilands J. B. “Universal chemical assay for the detection and determination of siderophores.” Anal Biochem, (1987) 160(1): 47-56.
[0276] Kuiper I. et al., “Characterization of two Pseudomonas putida lipopeptide biosurfactants, putisolvin I and II, which inhibit biofilm formation and break down existing biofilms”. Mol Microbiol, 2004, 51: 97-113
[0277] López-Garcia B. et al., “Identification of Novel Hexapeptides Bioactive against Phytopathogenic Fungi through Screening of a Synthetic Peptide Combinatorial Library”. Appl Environ Microbiol, 2002, 68: 2453-2460

1. (canceled)

2. A process for obtaining a viable cell suspension derived from a strain of Pseudomonas sp. deposited at the “Colección Española de Cultivos Tipo” (CECT) under the accession number CECT8708 or a mutant thereof; wherein said mutant is obtained using the CECT8708 of Pseudomonas sp. as a starting material, maintains the dual bactericidal and fungicidal effects of CECT8708, and has a genome with an Average Nucleotide Identity (ANI) to the genome sequence SEQ ID NO: 1 of at least 99.8%, the process comprising:
(i) inoculating the strain in a culture medium,
(ii) subjecting the inoculated culture medium of the step (i) to conditions suitable for growth of the strain, and
(iii) optionally subjecting the medium resulting from step (ii) to a concentration step.

3. A cell-free extract derived from a strain of Pseudomonas sp. deposited at the “Colección Española de Cultivos Tipo” (CECT) under the accession number CECT8708 or a mutant thereof; wherein said mutant is obtained using the CECT8708 of Pseudomonas sp. as starting material, maintains the dual bactericidal and fungicidal effects of CECT8708 and has a genome with an Average Nucleotide Identity (ANI) to the genome sequence SEQ ID NO: 1 of at least 99.8%, said extract being obtainable by a process comprising: (i) inoculating the strain in a suitable culture medium, (ii) subjecting the inoculated culture medium to suitable growth conditions, (iii) separating the cells from the culture medium of step (ii), (iv) collecting cell-free extract; and (v) optionally subjecting the cell-free extract to a concentration process.

4. (canceled)

5. A pesticide composition comprising:
(a) a strain of Pseudomonas sp. deposited at the “Colección Española de Cultivos Tipo” (CECT) under the accession number CECT8708 or a mutant thereof; wherein said mutant is obtained using the CECT8708 of Pseudomonas sp. as starting material, maintains the dual bactericidal and fungicidal effects of CECT8708 and has a genome with an Average Nucleotide Identity (ANI) to the genome sequence SEQ ID NO: 1 of at least 99.8%, the strain or mutant being at a concentration from 10⁵ cfu/mL to 10¹² cfu/mL; or
(b) or the cell-free extract as defined in claim 3, or
(c) an inoculation product, comprising a strain of Pseudomonas sp. deposited at the “Colección Española de Cultivos Tipo” (CECT) under the accession number CECT8708 or a mutant thereof; wherein said mutant is obtained using the CECT8708 of Pseudomonas sp. as starting material, maintains the dual bactericidal and fungicidal effects of CECT8708 and has a genome with an Average Nucleotide Identity (ANI) to the genome sequence SEQ ID NO: 1 of at least 99.8%; and
(d) one or more agriculturally acceptable compounds.

6. The pesticide composition according to claim 5, wherein the one or more agriculturally acceptable compounds is selected from the group consisting of plant strengtheners, nutrients, wetting agents, compounds that improve adherence, buffering compounds, stabilisers, antioxidants, osmotic protectors, and sunscreens.

7. The pesticide composition according to claim 5, comprising at least one additional pesticide.

8. The pesticide composition according to claim 7, wherein the additional pesticide is one selected from the group consisting of a bacterial strain with antifungal and/or antibacterial activity, a fungicide, a bactericide, an herbicide, an insecticide, a nematicide.

9. A method to obtain a mutant of a strain of Pseudomonas sp. deposited at the “Colección Española de Cultivos Tipo” (CECT) under the accession number CECT8708 or a mutant thereof; wherein said mutant is obtained using the CECT8708 of Pseudomonas sp. as starting material, maintains the dual bactericidal and fungicidal effects of CECT8708 and has a genome with an Average Nucleotide Identity (ANI) to the genome sequence SEQ ID NO: 1 of at least 99.8%, comprising the step of subjecting the strain to a DNA recombinant technique.

10.-11. (canceled)

12. A method for controlling an infection caused by bacterial or fungal pathogen in a plant, comprising applying:
a strain of Pseudomonas sp. deposited at the “Colección Española de Cultivos Tipp” (CECT) under the accession number CECT8708 or a mutant thereof; wherein said mutant is obtained using the CECT8708 of Pseudomonas sp. as starting material, maintains the dual bactericidal and fungicidal effects of CECT8708 and has a genome with an Average Nucleotide Identity (ANI) to the genome sequence SEQ ID NO: 1 of at least 99.8%; or
a cell-free extract derived from a strain of Pseudomonas sp. deposited at the “Colección Española de Cultivos Tipo” (CECT) under the accession number CECT8708 or a mutant thereof; wherein said mutant is obtained using the CECT8708 of Pseudomonas sp. as starting material, maintains the dual bactericidal and fungicidal effects of CECT8708 and has a genome with an Average Nucleotide Identity (ANI) to the genome sequence SEQ ID NO: 1 of at least 99.8%, said extract being obtainable by a process comprising: (i) inoculating the strain in a suitable culture medium, (ii) subjecting the inoculated culture medium to suitable growth conditions, (iii) separating the cells from the culture medium of step (ii), (iv) collecting cell-free extract; and (v) optionally subjecting the cell-free extract to a concentration process; or
an inoculation product comprising a strain of Pseudomonas sp. deposited at the “Colección Española de Cultivos Tipo” (CECT) under the accession number CECT8708 or a mutant thereof; wherein said mutant is obtained using the CECT8708 of Pseudomonas sp. as starting material, maintains the dual bactericidal and fungicidal effects of CECT8708 and has a genome with an Average Nucleotide Identity (ANI) to the genome sequence SEQ ID NO: 1 of at least 99.8%; or
a pesticide composition as defined in claim 5,
to the affected part of the plant and/or to the seed or to the substrate or soil used for growing said plant.

13. A kit comprising an effective amount of:
a strain of Pseudomonas sp. deposited at the “Colección Española de Cultivos Tipo” (CECT) under the accession number CECT8708 or a mutant thereof; wherein said mutant is obtained using the CECT8708 of Pseudomonas sp. as starting material, maintains the dual bactericidal and fungicidal effects of CECT8708 and has a genome with an Average Nucleotide Identity (ANI) to the genome sequence SEQ ID NO: 1 of at least 99.8%; or
a cell-free extract derived from a strain of Pseudomonas sp. deposited at the “Colección Española de Cultivos Tipo” (CECT) under the accession number CECT8708 or a mutant thereof; wherein said mutant is obtained using the CECT8708 of Pseudomonas sp. as starting material, maintains the dual bactericidal and fungicidal effects of CECT8708 and has a genome with an Average Nucleotide Identity (ANI) to the genome sequence SEQ ID NO: 1 of at least 99.8%, said extract being obtainable by a process comprising: (i) inoculating the strain in a suitable culture medium, (ii) subjecting the inoculated culture medium to suitable growth conditions, (iii) separating the cells from the culture medium of step (ii), (iv) collecting cell-free extract; and (v) optionally subjecting the cell-free extract to a concentration process; or
an inoculation product comprising a strain of Pseudomonas sp. deposited at the “Colección Española de Cultivos Tipo” (CECT) under the accession number CECT8708 or a mutant thereof; wherein said mutant is obtained using the CECT8708 of Pseudomonas sp. as starting material, maintains the dual bactericidal and fungicidal effects of CECT8708 and has a genome with an Average Nucleotide Identity (ANI) to the genome sequence SEQ ID NO: 1 of at least 99.8%; or
a pesticide composition as defined in claim 5.

14. A method for controlling an infection caused by bacterial pathogens and/or fungal pathogens in a plant, comprising:
using the kit according to claim 13.

15. The pesticide composition according to claim 5,
wherein the one or more agriculturally acceptable compounds is selected from the group consisting of plant strengtheners, nutrients, wetting agents, compounds that improve adherence, buffering compounds, stabilisers, antioxidants, osmotic protectors, and sunscreens; and
wherein the pesticide composition further comprises at least one additional pesticide.

16. The composition according to claim 15, wherein the at least one additional pesticide is selected from the group consisting of a bacterial strain with antifungal and/or antibacterial activity, a fungicide, a bactericide, an herbicide, an insecticide, and a nematicide.

17. The method according to claim 12, wherein bacterium or fungus is a plant.

18. The method of claim 9, wherein the DNA technique is mutagenesis.

The application's sequence listing, which the Patent Office published only in electronic form, follows.

SEQUENCE LISTING (7 sequences)

SEQ ID NO: 1 - DNA, 6090158 bp, Pseudomonas sp. (residues 1-2,030,053 of 6,090,158)
  misc_feature (1)..(40): n is a, c, g, or t
  misc_feature (32029)..(32267): n is a, c, g, or t
  misc_feature (266259)..(266298): n is a, c, g, or t
  misc_feature (308738)..(308777): n is a, c, g, or t
  misc_feature (366282)..(366321): n is a, c, g, or t
  misc_feature (485794)..(485833): n is a, c, g, or t
  misc_feature (490635)..(490674): n is a, c, g, or t
  misc_feature (609891)..(609930): n is a, c, g, or t
  misc_feature (617018)..(617057): n is a, c, g, or t
  misc_feature (696285)..(696324): n is a, c, g, or t
  misc_feature (735386)..(735425): n is a, c, g, or t
  misc_feature (864787)..(864826): n is a, c, g, or t
  misc_feature (902670)..(902709): n is a, c, g, or t
  misc_feature (910376)..(910415): n is a, c, g, or t
  misc_feature (954467)..(954506): n is a, c, g, or t
  misc_feature (987109)..(987148): n is a, c, g, or t
  misc_feature (1037321)..(1037360): n is a, c, g, or t
  misc_feature (1067930)..(1067969): n is a, c, g, or t
  misc_feature (1154621)..(1154660): n is a, c, g, or t
  misc_feature (1209285)..(1209324): n is a, c, g, or t
  misc_feature (1258184)..(1258223): n is a, c, g, or t
  misc_feature (1260899)..(1260938): n is a, c, g, or t
  misc_feature (1279229)..(1279238): n is a, c, g, or t
  misc_feature (1302655)..(1302694): n is a, c, g, or t
  misc_feature (1340253)..(1340292): n is a, c, g, or t
  misc_feature (1358997)..(1359036): n is a, c, g, or t
  misc_feature (1453806)..(1453845): n is a, c, g, or t
  misc_feature (1479493)..(1479532): n is a, c, g, or t
  misc_feature (1587608)..(1587647): n is a, c, g, or t
  misc_feature (1645941)..(1645980): n is a, c, g, or t
  misc_feature (1662443)..(1662482): n is a, c, g, or t
  misc_feature (1686349)..(1686388): n is a, c, g, or t
  misc_feature (1713675)..(1713714): n is a, c, g, or t
  misc_feature (1735046)..(1735085): n is a, c, g, or t
  misc_feature (1744847)..(1744886): n is a, c, g, or t
  misc_feature (1807249)..(1807288): n is a, c, g, or t
  misc_feature (1817496)..(1817535): n is a, c, g, or t
  misc_feature (1898481)..(1898520): n is a, c, g, or t
  misc_feature (1926437)..(1926476): n is a, c, g, or t
  misc_feature (1942893)..(1942932): n is a, c, g, or t
  misc_feature (1980753)..(1980792): n is a, c, g, or t
  misc_feature (1989098)..(1989137): n is a, c, g, or t
  misc_feature (2063947)..(2063986): n is a, c, g, or t
  misc_feature (2138416)..(2138455): n is a, c, g, or t
  misc_feature (2162477)..(2162516): n is a, c, g, or t
  misc_feature (2203782)..(2203821): n is a, c, g, or t
  misc_feature (2282262)..(2282301): n is a, c, g, or t
  misc_feature (2301355)..(2301394): n is a, c, g, or t
  misc_feature (2329748)..(2329787): n is a, c, g, or t
  misc_feature (2378305)..(2378344): n is a, c, g, or t
  misc_feature (2468632)..(2468671): n is a, c, g, or t
  misc_feature (2483870)..(2483909): n is a, c, g, or t
  misc_feature (2493763)..(2493802): n is a, c, g, or t
  misc_feature (2517815)..(2517854): n is a, c, g, or t
  misc_feature (2534247)..(2534286): n is a, c, g, or t
  misc_feature (2574050)..(2574089): n is a, c, g, or t
  misc_feature (2615359)..(2615398): n is a, c, g, or t
  misc_feature (2624399)..(2624438): n is a, c, g, or t
  misc_feature (2654015)..(2654054): n is a, c, g, or t
  misc_feature (2739383)..(2739422): n is a, c, g, or t
  misc_feature (2755327)..(2755366): n is a, c, g, or t
  misc_feature (2762142)..(2762181): n is a, c, g, or t
  misc_feature (2798011)..(2798050): n is a, c, g, or t
  misc_feature (2836580)..(2836619): n is a, c, g, or t
  misc_feature (2884822)..(2884861): n is a, c, g, or t
  misc_feature (2896718)..(2896757): n is a, c, g, or t
  misc_feature (2940973)..(2941012): n is a, c, g, or t
  misc_feature (2956379)..(2956418): n is a, c, g, or t
  misc_feature (3002822)..(3002831): n is a, c, g, or t
  misc_feature (3014311)..(3014350): n is a, c, g, or t
  misc_feature (3021511)..(3021550): n is a, c, g, or t
  misc_feature (3056166)..(3056205): n is a, c, g, or t
  misc_feature (3102840)..(3102879): n is a, c, g, or t
  misc_feature (3198223)..(3198262): n is a, c, g, or t
  misc_feature (3267524)..(3267563): n is a, c, g, or t
  misc_feature (3345707)..(3345746): n is a, c, g, or t
  misc_feature (3403966)..(3404005): n is a, c, g, or t
  misc_feature (3440934)..(3440973): n is a, c, g, or t
  misc_feature (3482847)..(3482886): n is a, c, g, or t
  misc_feature (3566433)..(3566472): n is a, c, g, or t
  misc_feature (3600655)..(3600694): n is a, c, g, or t
  misc_feature (3632605)..(3632644): n is a, c, g, or t
  misc_feature (3669417)..(3669456): n is a, c, g, or t
  misc_feature (3687113)..(3687152): n is a, c, g, or t
  misc_feature (3721720)..(3721759): n is a, c, g, or t
  misc_feature (3743749)..(3743788): n is a, c, g, or t
  misc_feature (3798737)..(3798776): n is a, c, g, or t
  misc_feature (3870931)..(3870970): n is a, c, g, or t
  misc_feature (3924159)..(3924168): n is a, c, g, or t
  misc_feature (3931557)..(3931596): n is a, c, g, or t
  misc_feature (3971507)..(3971546): n is a, c, g, or t
  misc_feature (3977953)..(3977992): n is a, c, g, or t
  misc_feature (4019490)..(4019529): n is a, c, g, or t
  misc_feature (4042513)..(4042552): n is a, c, g, or t
  misc_feature (4067134)..(4067173): n is a, c, g, or t
  misc_feature (4120022)..(4120061): n is a, c, g, or t
  misc_feature (4177779)..(4177818): n is a, c, g, or t
  misc_feature (4205043)..(4205082): n is a, c, g, or t
  misc_feature (4380475)..(4380514): n is a, c, g, or t
  misc_feature (4498798)..(4498837): n is a, c, g, or t
  misc_feature (4626845)..(4626884): n is a, c, g, or t
  misc_feature (4637477)..(4637516): n is a, c, g, or t
  misc_feature (4660957)..(4660996): n is a, c, g, or t
  misc_feature (4681587)..(4681626): n is a, c, g, or t
  misc_feature (4729600)..(4729639): n is a, c, g, or t
  misc_feature (4748301)..(4748340): n is a, c, g, or t
  misc_feature (4768545)..(4768584): n is a, c, g, or t
  misc_feature (4844471)..(4844510): n is a, c, g, or t
  misc_feature (4893964)..(4894003): n is a, c, g, or t
  misc_feature (4913205)..(4913244): n is a, c, g, or t
  misc_feature (4936516)..(4936555): n is a, c, g, or t
  misc_feature (4948055)..(4948094): n is a, c, g, or t
  misc_feature (4959550)..(4959589): n is a, c, g, or t
  misc_feature (5043487)..(5043526): n is a, c, g, or t
  misc_feature (5105732)..(5105901): n is a, c, g, or t
  misc_feature (5188411)..(5188450): n is a, c, g, or t
  misc_feature (5293493)..(5293532): n is a, c, g, or t
  misc_feature (5369254)..(5369293): n is a, c, g, or t
  misc_feature (5392057)..(5392096): n is a, c, g, or t
  misc_feature (5511631)..(5511670): n is a, c, g, or t
  misc_feature (5656594)..(5656633): n is a, c, g, or t
  misc_feature (5799509)..(5799548): n is a, c, g, or t
  misc_feature (5938008)..(5938047): n is a, c, g, or t
  misc_feature (5979513)..(5979552): n is a, c, g, or t
nnnnnnnnnnnnnnnnnnnnnnnnnnnnnnnnnnnnnnnntggttaccttgccacccaccgtggtggttgaaccggtggtgatgttgtagcgccttacattgggttctccatgcagtcgatgaggttggcgttggtcggtccaactggctgctgaacttgaaaatcaatgctcttcatgtttggtccttttttagcgcgcaaggatgctcaaacgcggtcgttgcgttgttatgcaaaaggaagggcgccgaaatggcgcaaggaagatattgctgacgagcgcaaagccaaacaactgtccgttcggctaggtagtgggaaaaacagaaacgtcttacaaggctttgaggttgtccctaggacactcgacctctagtcttcgtacaccgctgcacacgcagcggttgggcgtcgcggcccggtttaatcagacgcaaagtgccatttccgctttcagatgacgcctttttatcgtctactgtgcggcgttatggtggctgtgcgcgggataccttcgggtatgccggtttcctgattccggtccgcgaacctgcgtacagctaccacccgatcgcgtcgcggcgatctgtggcagctccacttaaatcaggaagttcacgatgatccaacctaccccccatccccccatccgcttgttcactgtagccgcaggcatcagtaccgaagacctgttggtcaacctcagcgaaacactggcctcggccaatgcgctgagttgcgatctggcctttgaccttgaaggaccaaaacgagaggagctgctgggcgttgcgcagttaatcgaactggcacagttgctagctgatcgggtactcaatgtctcggggcaagtaacccggtgagatgacggcaataccccgagaacctggtatgtctggcggtgcgcctgttgcgcagccaggggtaaacccgccgcctgttacaccgctatcgcaggcaagccagctcccacaattgaccgtatttccaagttggaacgcggtcactgtgggagctggcttgcctgcgatgaatccaacgcggtgtccctgaacatcccccctcaatgtaggagcgagcttgctcgcgaaaaacctgagaacaccgcggggcggcaggcaacccgcgtcatcgttacttctttttcttcggcttcaaatacttggtcagcccctgaaaccagatcaccagtgccgggttgcccttgatctggatcgacttgtcctgaatccccgtcatgaacgccagttgcttgttcttcgcctgcatcgtggcgaagccgtaggcggcatccttgaaggcaatcgcgaaggccggcgccgggtggacacctgagcggctggtgatgcgctggtctttgacgatgaagtgacgggcaaccttgccgtcgagggtctgcagctggaaggccaggtctttgtcacccagttgctgctggaaggcggggttggtgcggctggctttgcccatcatcaggcccagcacccacaggagaagacgaaatttcatgcacacggcctcggtgtatttattggagtggccgcagcagtgtaacgatttgcaaaaagaacgccaccgatctcgcgctttaggcgcagatcggttggcgtttaacgcttatagcaacaagtacttaaacgttagggcacggcactggcgcccagtcggccaggtttggattgcggcaggtcgcttcgatctgggtcttacccgcactggcaacctgcttgctttcagcttgcttggcctgcacggtctggatgctgcgctcggtggttaccgcttctttcggcactgtcggcagcaccggcttcttggccggtttgacggctttcttgcccttggccggagcgaccacttgcgtggtatcggcggtggccacggtcaccacatcgctgcgctgtacgccgacctgttgcaggtctttctcgtaggcctgggtgtagttgttcaagtcttcgctggctttgccgttgaccgtcacgatcaggtcattggattccttcaggcccgcgacgatttccgccaggcgcttgcggccttcggtgtcgttgacggtcttggccttgcgatcagccaccagcttggtgaatgcgctctggtagcactgctgcgaggccttggcataggcggtgctgcggtcgatgtccgaggcgcttttgttgaagtcagtggagtaggacgcgatgcgctggttgtcatcggtgatctgcttctggcgctcggtgtagtaccccgccgcgccgccagccagggcgccgcctgcggcaccgattgcggcattgcggccacggctgtccttgtcgccggtcagggcgcccagcagggcaccgccagccgcgccgagggctgcaccggtgacgaccgacttggtcatgtccgaatcggtggcgcgcaggtgctgcaccggctcgtagcagttggggtagtactcgaccttggtgctcgacgccaccttggacgcaggcgacgtagcgcaaccagtcaacacggtactgaaaccagctgcgatcagcagcaggtgacgcttggaaaccgccttacgggaaaaaagcatagatgtgatctctgttaagtttgacttgcccagcacggcccaccgccgcctgagtcccttccaagctcgctagacagccaacgatcaagaccgctgaccgctcgctgcgagcaattccttcaagatcgttgccgggtcggcccgctgttgcttgcggtagttgccgacatggcgaacgaacagtgtcgcgcgcgtcaccaggctcttgccgagcactggcttgcgatccaactcttccttgatccgttgaaactgcgcctggatcaccgcatcggtgtagcgcgtgccggtggccaggttgtcgatgtaaatcgccaccgcgccgtccaacgcgctgcgtccattggtgatggccatgtcgaacagctgcgtgctggcctcgtccttgctgtccaccgcctgctggcgactcttctgcaggttggccaggcggatgttgtagttgctgatggtctcggccaccaacgccgccgactggatcaaattgcccgccgcttcttcgcgttgctgggcgatcagcgacacgttgcgcttgagctcttcgttgaccaggcccagttcggcttgcagcttgggatcgacactggcggcgatgatgctgtccaggcgtttggtcgggtcctgggcgtcgtcgatggcgtcggtcagggaggccaggcggccttccttctgccactgggcgaacaattccttgtaacgcgagcgcggcgccgacaacgcgccaatcgccacgcgaaaaccggtggtctcgttgctttgctcggtgccatcagcggcaaacagcgggtattcgcggcgcatgccggtgaacaacgtgccctcgccttccaggtagttgccgcccttgaccacaaagccgccgtaggtgccctggcggcggccggcgtggaccagttggaaggattcctggaccatttccgcggcgttgccgatcacgtcgaacatgccgatggggttaggcaatttggtaccgatgggcatcaaccgcgccgcctggccggtgccgccggccacttggttgaacaccgcgtaatcggccagcgggccatcgctttcactgccttcggcgcgccgtggatacaggcggccttcgaggtcctggcggctcaccgcctggccgccgcgtgcggcgtactcccactccacttcggtgggcaggcgcacgaagcccaggccgccgtcttcggccgacgcaccgcgcccgcttaccggcagcagttcgcggtgatatttcatcagccaggcgctgtacaccgccgagaaacgctcggcttcaaagcgcgacagcttcaccttgggcaaacgcccggccatgcccgtgggcgcctcacatgcgggagccggttcaccgctggccagggattgcgcctgggccatcacctgggcgtattggcgggtggtcacttcgtacttgccgatgaagtacagcatcggcttgagcggagtcttggcgtcggtcttcggcatctgcggcgcgatgaccttactccagtccttgggcaagtctttgagggtgaactggccgttaatgaagtcgcggcggtagccggaaataaacgactgctgataacccgcctcgccttcggcaaaggggtagcccaggctgatttcacggtcatccagggtgccctgggccaggatgtaggcgtagcggaacaccatgttgccttcgcagggcagcggcaggctcacgtcgtccggcaacggcttggggttgtcgagcttgtcacttgcctcatcggcccaggccagcgaggccaggctcagcgccacgcaggcgcccagtaatttatacatctctgattccttcagaagcctggatacgggccacccgccaaccaccacaggcggccgccacggcactgacgccgagcaccgccaccagggccaggccgtaatggcgcgccaacaggtggctggcgtactcgcccggcacctgcacaaaaagcttgttcaacgcggcctcggccagggcatacagcccaacgctgagcacagcggcaaaccctgcgctgtatagcgcttgcagcagcacaaacagcaacaacgcggcggtggaaaaccccagcaggcgcaacaccgagagttcccggtgcttgcgcgccaccgccgccagggtgcccgcgaaaatagccgcaaacgccccggccaacgccaacccggcgatgatccagaacacaatcgacaggttgcggctcaacgattgcacttgagcgatggtgtgcgcctgggttgaaaccaacaggtgctgcccggcgaaatacacccgcagcggttccacatcactgaggctgcgcgcatacaggcgaaacgccgggtagatacgctgttcactcacgctcgccgcttcaccagcccaacccaacgccggcaccgcacggccatcgcggtaatcttccgctgcctccagcaacgccagatcggcaaacaggccctcgcgagcgaaggcctccagcggcaacaccgccagtacctgcaaccgcgtgcgctgggcctcgacgcgccccgccacttgccgcgcaaagctggtttccagccagtcaccgggccttgccgcaagcttttcggcggcggtatggctgagcacgatctggtccaggccgtggggcatcggcaagcctgccaacagcgggtcccctgcggcagtcggcagcatttccagggtcaaggtgcccacctgcgccgtggccgcaatttgccgtgtgcgcggcacagcaaaggccacatcgctgcgctcacccagttgcgcgataaacgccgcgctgaatcggccaccgcccaatgggatgatttcacggctggcggggtcggtctccaagcgttcggtcaaactgctaaccagtccaaatttcagcccgaataacaccagcaatggcgcgataaccgctaccagtgccaacaccgagcaggccgacagccacccatcgttgcggtagtcctgccaggcgagcgaggcaaccaggccgatgcgcatcagcacgcctccccgagggttgcggtgacgccgccgtctggatcgcgctggcaactgatacgccgcacctgcaagccactggcgcgggccagcggttcgtcatgggtggcgatcacacaggccgtacggtgttcgcgggcctgggccagcagtgcctgcatcacgcgctcggcgttgagcgggtccagggacgccgtcggctcatcggccagcaccagttgcggcccatgggccagggcccgcgcgcagctgacccgctggcgttggcccaccgacaacgccgccgggcgcttggccaactgatcgctgatctgcaactgctcagccaggcgcgccacgcggccgtcgtcctgcaagcccagcagttggcgcgacagcgcgatattgccgcgcacatccagaaaccccagcaagcctccggtctgcggcacatagcccaagtgctggctgcgcaacgcggccagcgccgattgccggtcggcacgccacagcgcgccgatgtcctgttggttgaacgcaaactgccccacctgatccggcgccaacaccagcgccagcaggtcgagcaaggtgctcttgccgcaaccgctggggccgacaattgccagttgttcacccgcgcccagctgcaacgcagggatcaccaggctgtagcgctggctaccgaggccccggctcttgtgcaccgcgttcaggctcagcattacggcagcgtcgacagtggcacgcggtacaacgcatcgcccggttcggcatcgccgaaacggacccagttggccacgtcgttatggaaggtttcatacaggcggattttcgaatccagctcgtcgataaagtcttcctgctcggccacgctcaatgacaaccacaggtcctgggtcatgttcagcgacttgctgcggtacggcaggccctccaggtattcaccgagcaggccgccgtcagccaggttgccgcccttgcgcagggcctgcgggtcacggctcatataggccgaggcgctggcgatttcctggaagaaatccttgggcgagctttgggtcttgcgcgccgcatccacgatcaacttcaacgattgttgcaggtcgttgagttgcagcttggtcagcatcacgcacacctggaacgctggcagcgccgggttggtcaggtcacgatcagcggtccaggcgctgaccaattgcggtgcctgactcgcggttttgcgcccgagaaagtccatgtgcatggcatagccgacggcggcggacttgtccgccagactcggcgcagcactgagcaacggcacgggctgcggcgtgttgctgcgcacctgatgcacgaggttggcgaacaccgtgccgatctcatcgacacgctcacccagcttgcgcacatcgccgcctggcactggcgtgtacaggtcgccgatctgcgggttggcgtcggcggtgaggacgcgatactggctctcggcaccggcatgggttttcttgccggcgtcggtgcgcaggtgcagcgcatagatcttgatctgcttacccagggccgcctggcgcacttcggcttcgttcatctgggtggcggcgaacgggtcgttcttgcgcagcgcgccggcatcggaaaccagcaggatgatgcgcccgccgtagccggaccaatccatgccgtccaccgcctgcatcaccccggcaaacgcatcttcgttgaacgagtggctggacaccgtcgacgctttgacctggcgcgccatatccaggaagcgttgcggatcgcggccttggtcgagggtgataagggtcttggcgacatactcaaggcccggggttttctggatgctgctgcgaaagccgaccatgccgaagctgacgctgtccaactcgccacgctcggcaatacgggtttgtagctcatgcaccacgtcgcgaatctggtcgatgtagggctgcatcgacacggtggtgtccaccaccagcaccacggccgtgcggaacgcgtcggcattggcgctgagcgtcgggctggccggtctggcagcggcgcggctgcctgggtcgatggaggccacgttgagcaactgcaccggctgcccgttgtcgtcgaagctctctttggaatcgaagatcggcaacaggtagaactggttctgcggcaccgcgctggcggtgggttccagggccaggacttgctggttgtcttctcggttgttctgcgccttggccaaggcgcttttcgctgcagcagggtcagccagtagtttttccacctcaccgggctggcgcaggaacatcacgggcgcccggcctgagcgctcggtgaacttgagcaccaggctttgtttccagtcgctgacctgggaggccggcagccaaccgtcgctgcgaccatcggtggcggcgccgacgcgtacccacgggctgccgtcgacgtctttgcgctggtacacgtagagcacggaaaacgccggcagcgctttacccggcgagctccctgcgtccgctgaaagctgggcgccgggtttgctgagtacgcgctggaacaaggttttcttgcctgccatcagcaacgggcgttgaccgccatccacttcagcgacagccaccgctggcgtcaccttgggcaccacggcggctggcggcggggccggttcatcgccgccgctcaaccaccagtagctggcgccaccaatggccaacgcgacggcgaccgccacggcggccaaggccaataccggaccacggcgctgctcggacggggcattgtgctgggtcggcgtgaccaccggttggcgcgctattggctgcggctgcggtttatcagtcggaatgtcgatggtgacaggagtcatgcccgccagatcaacgctcaatggaatcggcagcggccgtaccagcgtggcgtccgattcatccgccggcagttgatccagcgccaacaacaacgctgccgcatctggataacgctccgccgggtccttggccaacaacttgcgcagcacaccctggtagcgcccgtgatgcaccggcaattccggcaagggttcagtcaagtgcgccagagcggtagaaagtgcatcggtgccgttgtaaggcagcttgccgacgaggatttcatacagcaccacgcccagcgcgtagaggtcggcgcggccatcgatctcctggccccgcgcctgctcggggctcatgtagctgggtgtacccacggcaaacccggcctgggtgaattgggtgcggtcgtccagcgacttggcgataccaaagtcggacagtactgccgtgccatcggcccgaaacagaatgttcgccggcttgacgtcgcggtgcaccagcccttgggcatgggcatagcccagggccgaagcaatctggcggatcagcgtcacgccctgctccggggtcagcccagcagcaatgcgctccttgagcgtgccgttgggcaggtattccatggccatgtaatacagctcaccgacgttgccgatgtcatggatggtcaccgtgtgcgggtgcgacaagcgcgccagggtcttgccctcgcgcaggaagcgttcgcagaaactcgggtcggctgccagcgctgccgccatcaccttcagcgccactttgcgctccagcgaacgctgggtcgccaggtacacgctggccatggcgccttcgccaatctcgccttcgatgtcataacccggaatcacgatgttcatgacgagaccttcacgacgagggtggtgatgttgtctggtgcgccgcgattgagccccaggtgcaccaggctgcgcacgatttcatccggtgcgtcatggctgagcacgtcgcggatttcgtggtcttcgacggttttgttgaggccatcgctgcacagcaggtagctgtcgccgggggcgatcaacaggtccactgaggcgacgtccaactgggcctccacgccgatggcgcgggtgacgatattggagcgcgggtgggtgcgggcgtcggcttcgctgagcaggccgctgtcttgcaggtcttgcacgtagctgtggtcgcgggaaatgctttccagcacgccgtcgcgcaggcggtacaggcggctgtcgccggcccacaggcacaccccgcgcaagccgcgcgcggcgaacaccaccacggtgctgcccatcatggtcacgcctcggttggcggtttcttcgcgcacggctgcgttgatgcgcagcaggtcattgcgcagcgccgccgagtattcgtccagggagcggcccagcggcacatgccgcaggctgtcgacgatcaagctgctgacatagtcccccgccgcgtgcccgcccatgccatcggccaccacccacaagcggttttccggcaggtccagaaaggcatcttcgttgacttggcgaaccatgcccacatggcttttgctcgcggattcgtacgtcacgcccatctacaccacaccttcttgtccgagcaaaaactgcgcaaaatcgctggcggcaggcaagccctggcaccgtaataaaccgggagagatacgctgcgaacctcgcccccaccacaggcttgcgccctcgcacgcctgttcagccagcgcggtcatacgctggtgcggcacggtggctgccaccctttgcaggccggcgaaacggctgtccaccgcccgcggctcgctggccggcacacccaactcgtcgagcccggcgttgaagctttcgaaggtcgcgccgctgtcgagggtgctgagcaacaaggtttcagcctgctcgaaccaggcgtccgaaccgcccaccagcgacgccgggttggtgttgtgatccagcaaggtcaccaccgccagcggaaaataccgcccgacccgatcaatgctcggcatcaccacgcccgccgccgcatccggcccgcacacgcccggcgccagcacaaagcgccacaacgggctgaccaggtacgcattcagccagtcagcgccgaggctgttctggctggcgagcaaacccgcagccagccagctgtcccacgggccgataaagctctggggcaaggcgcggctgacaaagtcgccgcggctggccaacttgccgtagaaacccagggccgtcatagccgctccggcaggctgaagccgctgagcacgcggctcttgaatgggttgaacgcactgttggcgcgcaactcgtaggcgatgctcgcaccatcgacccgcaggcgcaggttgaaacggtccggcgagttgcctgcggtgaggtctgattgctccagtaggcggaaccaggcccacgggccgtccagggtgataccggagcgaccactggccgacggcggcatgatggaaatacgcaccacgccaatgctgccggggttcggccattgcatagctaccgggcggctcgggccgtggtcgtagctcagttgctggccgtccaggtcgagcaggaactgggtgatggtggggtccatcgacaccggcttgagctcgaaacgcacgatcggctgggtgccaccggagcggaagaacgcgtcccgaattgtcgccgcacgctggaaggtttgcagcacgccaggagcaatccccagcttctgcgccgcccccggttgccagcgccaggtctgtgccgacgtgtccacatagggctgcaggtatttgcggaagtagttgtccatcaccccgcccacgccgaagaattggccgaagtcatccaaggtggcgtcccgcgcactgcccggcgacatcgggtaacgcccggccaacgactggcgatacacgttgaccacttcactgacccaggccgcgttcagctggttacgcaccccgcccatcatgctgttggtggtggagttgaccaccgacttgaccatgccctgcaccagcggcggctggcgctcggcgttcaggctgacccgtgtggccgcagccgccgcctggttcttggcctcgccgagcaaggcatcgccgctggcaccgaccatggcgctgacctgcacatacagtgcattcatgtccgacagcaggccgtcgatggccgccggttcaccttcgtttttactcacggtgctgttgagttcggcaaagtgcgcggtcactggatcatccgccggcgccggggcattcgccgtcggttgcgcctcgcccagcaagctgccgaggcgttccttgagcttgtccacgccgccttccaccggtacgcctttggcggccagttggcgttcttcggcttgcaggtcggtttccctggcaaccgccaccagcagctttttcagcggcgaggtgggaccggaaatcacccgcagcacatcggcggcctgggccacgctggtgatcggcacaaagtcgatgtcagcgagcaacgcgtcccactggcgctggtaatcctggaagtacaagcggcgcacgtcggcggcgaggctcaccacgttctgctggtcggcctgttcatggcccagcacccattgctcttcggccagggtgccggtctggttcaggctgctgagcaagaacgcctggcgatagcccttggcggtaaagaaaccactcaacggctcacccaacggcttaccgctcttgcggctgaacaccagtgcggcatcgcgaccggcggcctcgttgatgcgaaagtccgggataccttcgggcagtttctggcgcttgacgcggtcgtacacgcgctgggctaccggcaattgctgcaactgccgacgcagatcgtcgatcagacgtgggaccaggcgcgcgttcggcgggtggcgttcgaacagcgcctgcaagtgcccggccagggcctgacgctggtcggccggcaggtcgcggggcaggttgcggtcccagtccagggcgatccaggccttgatgaagtccgggtcataatgctcggtgtcggcgagcatcaggtaagccttgaggccctcgtagagaaagtccgagttgccgccgccgtgcagttgctcttcgatacgcgtcaccaggcgtggcgcgaacacggcgatcaacagtttgcggtacacgctggcggactcggcttcgagcatatcaccctggtacagccccagcccttcggaccagctcggtgaatcccccgccaggttcttcacggcgttgagcaacggcagcacggcgagcacttcccgctgtgccgggctcaggttctggacggtctggcccaggggcgcgaccttctgatcgacctgggcgatatacgcctggttggcgcgatagcttacccaccacaggctgctgaccaccaccaccagcgtgacggtggccgccagtacgccacgggcgatccatttgcggcgccgctcgactttcgggttcacccccaccaggccgcgctctgcaaaggccacggcggtgaagagtttttcgatgaagtaactgcgcccagtgccgctctggcgcgccaggtgctggcggtccaggttcatgctctgggccatggcaccgatcaggcggtcaatcgggctgccttcctgggtgccgctggtgaagtacacgccacgcagcaacacgcgctcttcaaaggcattgggtttgaacacgccttcgagaaagctttgcaggcaatctttcaacgcgccgaactgttgcgggaagccgtagatcaggtcgcgccgtgccgggtcgcgttcctgttgcaagcgctcgaccaggcgttcgttgaggcgctgctccaggccggcgaattcgctttgcaggtgcgccagcgggctgtcgctgtttttgccgtcgtccagggcaaaagtcatgccccacacctgggcgcgctcttccttgctcaggttgtcgaagaactccatgaagcccggcaccaggtcgagcttggtgagcatcaggtagatggggaaacgcacgcccagctgcgtatacagctcctggatgcgcaagcgaatcgcggcggcatgggcagcgcgctcggcgtcggtgcccagcagcagatccgagaggctgatggcgataaacgcaccgtcgataggccggcgcgcacgctgctttttcagcaggtcgagaaagcccagccaggcggctttatccaccgtggagttgctgtcttgggtggtatagcggccggcggtgtcgagcaatacggcctggtcggtaaaccaccagtcgcagttgcgcgtgccccccacgccgcgcaccgcaccggcgcccaattgcgccgccagcgggaaatgcagcccggaattgaccagcgcggtagtcttgcccgagcccggcggaccgatgatcacgtaccacggcaactcgtagaggttgcggcgctcatcgccgcccagcttggcttttttcagcagtgccagggcttcgtccatacgctggcgcagcgtggacagctcttcggcggtcgcgacgctgttagggtcgaccggggtttctgcggccaggctgcgcatcacttcggcggcctggcgacgggcctggataatgcggaacacgcgataggccacccacagcgcaaacaccagcacgatcagcgcccaacggcgcccttcgggcaccagcacgtccagcagcgggccaacaaaccagatgatcaggctaagggcaatcaggcccagcacggggatcacccagcgaatcatgaaactgaaaaacgccttcactcgacgccctccgccaatacggtgatttcaacccgacgattgcgggcacggccttcggcagtactgtttgtggccaacggctcggtgtcgctgcggccttcggcactgaagcgctcggcctggccggtcttggccgcgagaatttccagcaccgacttggcccgggcttcggacagcgcccagttggacgggaagcgcaacgtggcaatcgggcgattgtcgctgtgcccggtgacacgcacttggcccttgaccttgcggatggcgtcagcgatgcgcagcatcagcggctggtagtcatcgacgatgctggagctggccgaggcgaacagctcatcgccacggatggtcacgacagagcggtcaaccttgtcttccaccgccacgcggccggccttgatgtcatcggccaggaacccggccaggcgcgggcgctcaatcactttgggctgcgccaccggacggtcgatggcctgcaccgggatctcgcccagggcatggatgttcttgaacaccggctcggcgtccgaggccagcttcaggcgcagaccgaacagcaacgccaacagcagcgccaagccaatcgccacggcgatccacggcggcatgaattgcgccaggcgatcacgggccacggtcacaccgcgccagtgcggtgacagctcacgctcgtgttcgccacgggcgctgcgaatcgccgcggcggtgcgttcgcgcaaggcttccaactggctgcgcccgtcagtcatcacgcggtaacgcccttcaaaacccaagcacatgcacaggtacaacagctccagcaggtacagacgctcccgtgggctttgcaggcagtggtcaagcaactggaaaaccttttcgccaccccaggcttcgttgtgcacggtgatcagcaggctctgtttaccccaatcgctggtgctgccccacggcgtgctcagcaccgcttcatccaaggcggtgcacagcgcgtaacgggccaacagcacttcattgcgtgccacaccggcggcttcggcgcgttcttcgaactggcgcaggtacgccagcaactgcgcacgcaggctggccggcgcggggtgggcgatggtgttgcgcagccgcgtcaacaacgccagcaacgggccggcggcgctttccagcgggttgaggccctggctcttgccggtgaggatcggcgcagccggcatcgacagcggcgcaggttcggcacgcgagggtgcaggctctcggccacccgggcgcggcatgaactgggtgcggtcatcatcattgggatgcatcgccaattatcctcggatcgcccagaaggccaggttcaagcccgggaactgcccggcgatatggaaggcgaaaccgccggaattgttcagctgctgccagtgctcgctgccatggtccagctcgtagtaggtgctgccggcgtggtaaggcaattggcgtggcgccaccggcaatggcagcaggccgatgcccggcagttgcaggttgaccatgtcgcggatgtgctccaccgagccgaccttgctctgctggccgaaacgcgcacgcagggtttcgccgggcacatcggcgcgcaccacgaggatgaaactggcgttgtcgagcagggtcttgtcggccagcatcgccacatggatgccgtaggccttctccacaatcgggatcggcgtggccttgctgtcgatcagcatcgacagcgcttcacgcagggccgccatcaccggcatgaaactcaaggccaggtcatcgtgctgatactgcgggtattcctgggggcgacggctggaggttgagaaggtggaaaactcaccggccaggctgaccagttcgctgaaaaagcgctccggatgcaacgggctcaactggctgaagtgctggatcagcggctgggcgcggttgaccagttgcagcagcatgaagtcggcgatctccgaggcaccaccggcacccgaagccaccacgcgaccggccagcgcttcgccacgctggtgcaacaggcccagcagttcgctgcgaaaggccgtcagcggtttgctcgcagccacgtccagcaccggcgggatgtaggtgtcatcgagcaccaatgcgcggtcggcgcgtttttccttgatgcgtaccaggccgatggcggcgtagtcgctgatgccatcctgcgctgtcagcaggcgcaatgcccgcgaccccaccgccaccggtgcacggttttcgaacggggcgttgtcgtcgcgcacttcgcgcacctggctcacgtagcgcgccgcttccagggcttcaccctcatccaccgtgtcacgggcgccggcgcgcttgagcggcagggccaggtacaccaggccgtcgcgcaggttgtcgtcgatattcaacgggctcggcgccaggtcgtcctggggaatattgaacggcgtgccatcgggcagcaggccgcgagccgacacgatcgccagcttgccctgggccagcaggccctggtcgatcagcaactcggagaacccccaggcacccgccgacaacgggcggctgcgggcgtcgatcaggttttccaggtaacggtcatgctgctggaagtgctgcgttccgatgaacatgccttccgaccagaccacgcgattgttccaggacatgggggctccgattgcttgttattgggctgggctggatggggaagccacgacgtcggcgcgcacggcatgcacgtcgaggctgatctggtattcgctgtattggcgcggcggcacgttgatgaccgtgcgccattgcgcacggtccaactcgcggtagcccaccagcaggccgatctggcgcgtggacgggtcgaggtcgcgctgcacgctcagttgttggccgggctgcaccatcacttcgtcctggtccagcaggtccaggccgagggtcgattgcgcacggtccgccagggcgaagtaatcggagcgtgaaaaggtagcggcgtttttcaattcgaaaatgcgcacccgcaccggcgcggcctggccgttggcaccggggttaagcccagcaatcgcgtgaaagtgcaattcgacggcggccgtgtcggcttcggcctcggcagccgcctggggtttgaccgcgtcgttggcacacgccgtcagcagcagcgcggtagcggctgcgagtaaaaacctgggaatcatcctgcgtcctcaatgacgtatttagctatccgttttatccattggtgcgaggcgttttcagcgtcgctgtcgtgcactgtgttcttcgtaggcccggctgaattcgcgaccgaacaggtcctggaaatcgtcctgggcctcgcgggaaatattgctgtagagctcggtgaactgctgccagtactgggcctggcgcgaaccgttgaacagactcgagaggccgccgggtttgcccatgcgctcctccaattgcgccggttcaaagcgcatgagcaggtgcttgatcgccgcttccacgccagccatcacggccaactggtgggcgcgcaggtcgtcgaaactgtcacgtacggcgaggtccggcgccatgaatgcctggttgccatgacgcagcaacagcagtaacgcttcatcggcattcggggcgaatttcaatgggttgttttcggcggggcggatcatcgtctgctgcatgcgaaactcgcccttgaggctggcacgggcacgcaatacgtcgatcaagccctcgaccatcaaccggtagctgcggccgatactttccatctgcgcacaggcgtcggctttgtccaggcgcaactggtccaggcccgcaccgcgcaggaaggcctgcaaaaggtccggttgtagctcggcattggccacggggagcgcaacaggctcgaccacaggtggcggcgggatgatcgggtctggggcaggcgcagcattgaccacaggcgcgggcgcgtcgccgaacaggtcccagtcttcgggaatcaccgagccttgcacagccggcttttcgggcgccggtacggccactggagccggggggcgaaaatcgtgttgctcggacggcacatggtccgccacggtgggcggcggcacggcggtggggctgaggaagtcgaacaggtctggcaaagtttccatggccgaggcgccctggaactgcggcgcaatcatcggtgtgggcgcaggttggctcgccacggcgcccatcagcgcttcaaagctgttgggtgagtcgccggcaaatggctggctgtcgatggcctgcacgttgaagtcgatgcgcgcctggatttcgtaatcaccgatgcggatcaactcaccgtcttgcaacggctcgctgttaccccgacgcatacgaatacccgccttgaccaattccacaccattggtgctgttatcggtcaagtagtaacggccatctttgtattgaataacgcaatgttgcgaagagacgagacgctcagggtcgggcaatacccagtcattgtcagaactgcggccaatagccatcacgccctgatccatggacttttcggggcattgcccaggggtgatcttgtgataactagtgatagtcaaacacagcgacatcttgcctccttgctgatacatcgcgcgcagcctacccaggaggctgtgccgccctggaaagtcccgtcctgtcgtacaaacgaccgccaaaatctgcttttaccagcatgatcgctgatcttaactggcttccatgacaaaaatccgctctgggcgcgcctttcgactcgccagtcgcgcaggttgttaaacaccgcacatctgtcacagagggcgaatagcttaccttgacaagccataagtactacaccaaaaatgcacaacttcttgaacatcagtgatggcgcagtagtggcacgctgagtgtatgaccaagaaaacatgcaaagttcattacgcaactagtgcatgcattgcccgccgtccagcgggccgataaggagatcgaattcagtggatgtgccgttgctgctcaccgccgtttccgcgacgtcaccctgtggcgaagacatggaatacgacgcgcaatttctgcagttggaacgtgatgccaagggccaacccgaacgcagcatgggcgactcgatcctgcccgctgagccgcccgagtggcgcagcatccagcagcaaagcctcgacctgttgcagcgcagcaaagacctgcgcatcacccactttctgctgcaaagcaccctcgccctccagggtgtggccgggctggccgaagtcctcacgctgatcgacgccttgctgcgccaatactgggccgagctgcacccgcgcctggatgccgacgatgacaacgaccccaccgtgcgcatcaacgcccttaccggcctgacctgcgagaccaatattcgtctgctgcgcgaaagcatcctgacgcgctcgcgcaccttcgggcccgtgaccctgcgcgcagcgctcaacgccagcggcctgcagagttttgccgatgagcagttgggcaaccagcaactcaacgccgcgttcctggacagcgaccccgaacaactgcaagccacccgtgacgccttgagcgcggcgcgtgcggcgtgcgaggccattgagcaacaggtcaatgaccaagtcggttccgcccagggcgtggacctcagcgccttgaagcagccgctcaaacaggccctgcaactgctcaatcaagcggtgccaggcaccgacagcagcagcgatcccgaggccgtcagtgaagacaatgccccctcggtcgataacgccgccgcgcccgcagctcctcgcccttctggcgacatcgccacccgcgacgatgtgctgcgcagcctcgacaaaatcctcgcgtactacacccgccacgagccttcgagcccgctgccggtgttgttgaaccgagccaagaatctggtgcatgccgactttgcggccatcgtgcgcaatctgattcccgatggcatgtcccaatttgaaaacctgcgcggccccgaaagcgagtaagccgccggaccgtgcagtaacaacaccgtcgctcaagcgaccaggagcagcaacgtggcgaagcaaagttctcagaaattcatcgcgcgcaaccgtgcgcctcgagtgcagatcgagtacgacgtcgagctttacggcgccgagaaaaaggtccagctgcccttcgtaatgggcgtgatggccgacctcgccggcaagcctgccgagccgctggcacccgtggccgaccgcaagttccttgaggtggacgtcgacaacttcgactcacgcctcaaggccatgcagccacgcgtcgcgttccacgtacccaatgagctgacaggcgaaggcaacctgagcctggacatcaccttcgaaagcatggacgacttcagcccggccgccgtggcgcgcaaggtcgactccctgaaccagctgctcgaagcccgcacccaattggccaacctgctgacctacatggacggcaagactggcgctgaagaaatcatcatgaaggcgatcaaggacccggcattgcttcaggcacttgccagtgcgcccaagcctgcaggggagcagtaatcatgacggacaataccgcccgcgaaggcagccagatcctgggtaccaccgaagaagccagcgagttcgcgaacctgctgctgcaagaattcaaacccaagaccgagcgtgcccgcgaagccgttgaaaccgcggtgcgcaccctggccgaacaggccctggcgcaaaccgacctggtgtccaacgacgcgatcaagtcgatcgaatcgatcatcgccgccatcgacgccaagctcaccgcccaggtcaaccagatcatccaccaccaggatttccaacaactggaaagcgcctggcgtggcctgcattacctggtcaataacaccgagagcgatgagcaactgaagattcgcgtgctcaacatctccaagccagacctgcacaagaccctgaagaagttcaagggcaccgcgtgggaccagagcccgatcttcaagaagatgtacgaagaagaatacggccagttcggtggcgagccttacggctgcctggtgggtgactactacttcgaccagtcgccgcccgatgtggaactgctgggcgagctgtcgaaagtctgcgccgccatgcactcgccgttcatcgctgcggcctcgccgactgtgatgggcatgggctcgtggcaggaactgtcgaacccacgcgacctgaccaagatcttcaccaccccggaatacgccggctggcgctcgctgcgtgaatcggaagactcgcgctacatcggcctgaccatgccgcgcttcctggcacgcctgccgtacggcgccaagaccgatccggtggaagccttcgctttcgaagaaaacaccgacggcgccgacagctccaagtacacctgggccaacgccgcctacgccatggcggtgaacatcaaccgttcgttcaagcactacggctggtgctcgcgtatccgtggcatcgagtctggcggtgaggtggaaaacctgccggcccacacgttccctaccgatgacggtggcgtggacatgaagtgcccgaccgaaatcgccatcagcgaccgccgtgaagcggaactggcgaagaacggtttcatgccgctgctgcacaagaaaaacaccgacttcgccgcgttcattggcgcccagtcgctgcaaaaacctgccgaatacgacgacccggacgccaccgccaacgccaacctggccgcgcgcctgccgtacctgttcgccacctgccgtttcgcccactacttgaagtgcatcgtgcgcgacaaggtcggctccttcaaagagaaggacgaaatgcagcgctggttgcaggactggatcctcaactacgtcgacggcgacccggcgcactccaccgaaaccaccaaggcccagcacccgttggcggcggccgaagtgatcgtggaagaagtcgaaggcaacccggggtattacaactccaagttctacctgcgcccgcactatcagcttgaagggctgacggtgtcgttgcgcctggtatcgaaactgccttcggcaaaaagcgcataagtaacgattgagctagctcgttcccacgctccgcgtgggaatgccgcccgggacgctctgcgtcccggtgacgcgtagcgtcacaggatgcgttaccacgcagagcgtgggaacgatcacccaatcaagtggcatgggccacacagggagaaaacatggctgttgatattttcatcaagatcggcgacatcaagggcgagtccatggacaaggcccacaaggacgaaatcgatgtgttgaactggagctggggcatgtcccagtccggcaacatgcacgtcggcggtggcggtggcgcgggcaaggtgaatatccaggacctgtcgctgaccaagtacgtcgacaaggcttcgcccaacctgatgatgcactgcgccagcggcaagcacatcgacaaggtcaagctgaccgtgcgcaaggccggtggcgagagccaggtcgagtacatggtgatcaacctggaagaagtgctggtcacctccttgagcaccggcggttcgggcagcgatgatcgcctgaccgaaaacgtcaccctgaacttcgcccaagtgatggtcgactaccagccgcagaaagccgacggcaccaaagacggcggcgccatcaagtttggctggaacattcgctccaacaccaaacgctgatagcccttgtggccgtggcccggtgccacggccattgtgtccctctcgcaacccgtccgtggagctgctttggtggtaactgaaatcgcttcccgcgaccgtctgcaaccgtccctgctggaccggttgaccgacgacgacccgaccaaccccaaggaaagcgccgacaaacgcgtgctgtccctgacccaattgaaggcctcggtgctgcgtgacctggcgtggttgcttaacaccacctcgttactcgataccgatgccacgctgcacaccccggccggtacgtcggtggtcaattacggcctgccggcactggcgggcaacagcgcttcgagcgttgatatcaaagccctggaagccttgatttaccaggccatcgccactttcgagccgcgtattttgcgccacacattgcgggtcaaggcgcgcatgggccatggcgagatgaatcacaacgccctgagtttcgaaattgaaggcgacctgtgggcacagccggtgccgttgcgtttgctgttgcagaccgacgtggacctggagtccggccatgtgcgcgtgctcaatgccgaccagcggagacgcccatgaacccgcgcctgctggagctgtacaaccaggaattgcaccatgtgcgcgaaagcgccgccgagttcgccaaggaatacccgaagatcgccagtcggctgaccctgtccggtatggactgcgccgacccgtacgtcgaacgtttgcttgaaggcttcgcctatctcaccgcccgtgtgcagctcaagctcgacgccgagtacccgaccttcacccacaacttgctggaaatcgcctacccgcactacctggcaccgacgccgtcgatgaccgtagtgcaactgcagaccgaccccgatgaaggctccctggccggcggtttcccgctaccccgtgacaccgtgctgcgtgccgccctgggccgtgaaacccagacctgctgcgagtaccgcaccgcgcacccggtgacgctgtggccgttgcaggtcagcaacgccgagtacttcggcaaccccgccgccgtgctcgggcgcctggccgccagcgaaccgaaagccaaggccggcctgcgcctgaccctgcgcaccggtgccgagctgccgttcaacagcctcgatttggacaccttgccgctgtacctgagcggcgccgatgaacaaccgtttcgcctctacgaacaactgctgggcaatgcctgcgcggtgtttgcgcgccagcccggtggcgattgggtcgagcgcctgccccagggcgcgttgcgctcgcgggggttcgatgatgccgatgcggccatgccggtggtggcgcgggcgttccagggctatcgcctgttgcaggaatactttgccctgccccatcgcttcctgttcgttgagttcgccgagttgagccgtgcagtcaaacggtgtgacggccaggagctggaactgatcgtgctgttcgaccgccacgaaccgagcctggaaggcagtgtcggcgcggcgcagttcttgccgttctgcacgcccgccatcaacctgttccccaagcgcgtggaccgcatccacttgtccgaccgggtcaatgaacaccacgtgatcgccgaccgtacgcggccgatggatttcgagattcactcgttgagcggcatcaccggccatggcaccgggccggagcagccgttcttgccgttctatgcggtgcgcgatccgtcgcgctatggccgcgaccaggcctattacagcgtgcgccgcgagccgcgggtgctgtccagcgatcagcgccgcaatggcccacgctccacttatgtgggcagtgaaaccttcgtcagcttggtggacagccgccaggcgccgtatcgccatgacctgcgccaactgggcgtgacggcgctgtgtaccaaccgcgacctgccgctgttcatgagcgtgggcaacggcaagaccgacttcaccctggccgatagtgcgccggtgctggccgtgcggtgcgtcgccgggccaagccgcccgcgtgccagccatgcgcatgacgccaaggcctggcgcctgatcagccagttgtcgctcaactacctgtccttgagcgaacagggccagggcgccggcgccttgcgcgaactgctgcgcctgtacggcgacagcaatgacgccgccctgcaattgcagatcgagggcttgcgcgaagtcagcagtaaggcggtgacccgacgcctgccgatgcccggcccgattgtgtttggccgcggcctggaaatcaccttggagttcgatgaaaacgcgtttcgcggcaccggcgtgttcctgctcggtgccgtgctggagcgcttcctggcacgctacgtgtcgatcaacagctttaccgagacggtgatccgtaccaccgaacgcggcgagatcatgcgatggaaagccaagcccggacggcgtccgaccctgtgagaaccctggacgcgatgcaccaggagccctgggaatatgactttttccaggcattgcggcgcatcgagtgcgaaacgcccgagctgccacgcctgggccattccctgcgcctggccgatgatccgctgcgcctggggcagcaggccgattgcaccttcgcacccgccacccttgcctcggtcgagccaggaggcgatggcaagccggcgcggttggagcagttcttcttcggcctcggcggccccaacggcccgctgccgctgcacatcaccgagtacgtgcgcgagcgccagcgcaacaacgccgacagcaccagcaagcagttcttggatgtattccaccatcgcctgctgaccctgttctatcgggcctgggccgaggcgcggccaacggtcagccatgaccgcccggacgatgactactggtccgcccgcctcgccgccctgagtggccgcgggatgccgagcctgctcaatcaagggctgatccccgataccgcgaagctgcattacagcggccatctgtcggcgcaaacccgctacccggatggcttgaaagcgatcctcagcgagtacttcggcctgccggtagagatcgaggaatacgtcggccaatggctggaactgcccgaacgcagccgcgtgggggtcagcgccaaccagttgggcgtggacttctgcctgggcagccacgtgtgggaccgccagcacaaattccgcatccgcctgggcccgctcacgctggatgactacatgggcatgctgcccggccaacagccgttcaacgagctggtggcgtgggtggccgagtacctgggccatgaattggactgggacttgaatctggttttgcaacaacccgaagtaccggcgctgcaactcaacggccagttccgcctgggcttcaacacctggctcggccaacctgcgcatgacgccaacgacctaatcctggcccggcattacgccgaccacgccaccacctcaaggaatccagagcatgggtgaaatcagtcgcgccgcactgttcggcaaactcaacagcgtggcctacaaagccatcgaagccgccaccgtgttctgcaagttgcggggcaatccgtatgtggaactggcccactggtttcaccagttgctgcaactgcaggactccgacctgcaccgcatcatccgtcagttcaacgtggagccggcgcgcctggcccgcgacctcaccgaagccctggaccgcctgccgcgcggctccacatcgatcaccgacctgtcctcccatgtggaagaggccgtagagcgcggctgggtgtatggcagcctgatgttcggcgaaagccaggtgcgcaccggttatctggtgctgggcatcttgaagacaccgagcctgcgccatgcgctgctgggcttgtccggcgagttcgacaagatcaaggccgaggccttgagcgagcgctttgatgaatacatcggtgactcgccggaaaacgccttgagcgccagcgacggcttcaatgccggtgtccctggcgaggccagcggcgccatggcgcccagcgcgatgggcaagcaggaagcgctcaagcgtttcactgtggacctgaccgaacaggcccgcagcggcaagctcgacccaatcgtgggccgtgacgaggagatccgccaactggtggacatcctcatgcgtcggcgccagaacaacccgatcctcaccggtgaagccggggtgggcaagaccgccgtggtcgaaggtttcgccctgcgcatcgtcgccggtgacgtgccgcccgccttgaaagacgtggagctgcgcagcctcgacgtgggcttgctgcaagccggcgccagcatgaaaggcgagttcgaacagcgcctgcgccaagtcatcgaagacgtgcaggcctcgcccaagccgatcatcctgtttatcgacgaagcccataccctggtgggtgccggtggcgctgccggcaccggtgacgcggccaacctgctcaagcctgccctggcccgtggcaccttgcgtaccgtggctgccaccacttgggccgagtacaaaaagcacatcgagaaagacccggccctgacccgccgcttccaggtggtgcaggttgccgaaccgtcggaagacaaggccctgctgatgatgcgcggcgtggcgtccaccatggaaaaacaccaccaggtgcagatcctcgatgaagctctggaagcctcggtgaagctctcccaccgctatattccggcgcgccagttgccggacaaatccgtgagcctgctggacaccgcctgcgcccgcgtcgctatcagcctgcacgctgtgccggcggaagtggacgacagccgtcgccgtatcgaggccctggaaaccgagctgcaaatcatcgcccgtgagcatgcgatcggcattgccattggtgcgcgtcaaaccaatagcgaagcgctgctgaccgccgagcgtgagcgtctggccacgctggaaagccgttgggctgaagaaaaagccttggtagatgagttgctggctacccgtgccaccttgcgcgaaaaagccggtgtggtggacagcggcaacgatgcgttgcgtgcacaactggtcgacctgcaacaacgccttaccaccctgcaaggcgaaaccccgttgatcctgccgaccgtggattaccaggccgtggcctcggtggtcgccgactggaccggtatcccggtgggccgcatggcgcgcaatgagctggagactgtgctcaacctcgaccaacacttgaagaaacgcatcatcggccaggaccatgccctgcagatgatcgccaagcgcatccagacctcccgcgccggcctcgacaacccaagcaagccgattggcgtattcatgctggccggcacctcgggggtgggcaagaccgaaaccgcactggccctggccgaagccatgtacggcggcgagcagaacgtcatcaccatcaacatgagcgagttccaggaagcccacaccgtgtccacactcaaaggcgcgccaccgggctatatcggctacggcgaaggcggtgtgctgaccgaagcggtgcggcgcaagccctacagcgtggtgctgctcgatgaggtggagaaagcccacccggacgtgcacgagattttcttccaggtgttcgacaagggcgtgatggaagacggcgaaggccgggtgatcgacttcaagaacaccctgatcctgctgaccaccaatgccggtaccgaactgatctcccacgtctgtaaagacccggcgaacatccccgagcccgaggaaatcgccaaggccctgcgccagccgctgctggagattttcccaccggccttgctcggtagactggtgaccatcccgtactacccgctgagcgacgagatgctcaaggcgatcacgcgcctgcaactgaaccgcatcaagaagcgcgtggagaatacccacaaagtcgcgttcgagtatgacgacgccgtggtcgacctgatcgtctcgcgctgcaccgagactgaaagcggcgggcgcatgatcgacaccatcctcaccaacagcctgctgccggacatgagccgcgagttcctcacgcgcatgttggaaggcaaggcactggcgggagtgcggatcagtagtcgggataatgaactgcactaccagttcaacgattgacctgaagaaacacggtcaaaactgtgggagctggcttgcctgcgatagcggtctgacattcaacatcaatgttgactgaaccactgccatcgcaggcaagccagctcccacactggattcggtttcttcagttattaaggtatttacgggactaccgatgctattcaaccaagcctcacgcctggccaagatcaccagccccctcgggccggatgtgctgctgctcaacgaaatgggcggcggtgaagagctgggccggctgttcaactatgagctgcaactgacctccctggacgccaacatcgacctcaaccagttgctgggcaaaccgatgagcgtgggcctgcaactggccgacggtggcgaacggtactttcatggcatcgtcgcgcgctgcagccagaacatcgaccagggccagttcgccagttatcaggccaccctgcgcccctggttgtggttgctcagccgtacctccgactgccgtatcttccagaacctgagcatcccgcagattatcaagcaggtgttccgcgacctgggcttttccgacttcgaagacgccctcagccggccatatcgcgagtgggaatactgcgtgcagtaccgcgagaccagcttcgatttcgtcagccgcctgatggaacaggaaggcatctactacttcttccgccatgaacaggaccgccatgtgctggtgctggccgacgcctatggcgctcacaccaacgtgcctggctatgcgtcgatcccctactaccccaaggacgagcagcagcgcgaacgcgaccatatgcacaactggcacctggcgcaggaggtgcagccaggctcactggagctgaacgactacgacttccagcgccccagcgcgagcatcgacgtgcgctcggccatgccgcgcccgcacaccgccggcgattacccgctgtacgactaccccggcacctacgtgcaaagcgccgacggcgaacactatgcgcgcacccgcatcgaagccctgcaaaccctgcatgaacagatcgagttcagcggcaacgcgcgcggcctgggctcgggccatctgttcagtctcaccgggttcagtcgccaggaccagaaccgcgagtacctgatcgtcggttgccgctacttcatcgtgcaggaaagcctggaaagcggtggcggttcaggctcggcgcagtttgaaagcagcctgacctgcatcgacgcccaacagagtttccgcccgctggccaacacccaccgccccatcgtcaaaggcccgcagaccgcgttggtggtaggccccaagggcgaggaaatctggaccgaccagtacggccgcgtgaaggtgcacttctactgggaccgccacgaccaatccaacgagaacagctcgtgctggattcgtgtgtcgcaatcctgggccggcaagaactggggttcgatgcagattccacgcatcggccaggaagtgattgtcagcttccttgaaggcgacccggacagaccgatcatcaccggccgcgtctacaacgctgagcagacggtgccctacgatttgccagagaacgccacccagagcggcatgaaaagccgctccagcaagggcggaacgccggccaacttcaatgaaatccgcatggaggacaagaaggggttggagcagttgtatatccatgccgagcgtaaccaggacatcgtggtggaggtggatgagagccactcggtggggcatgaccgcaataaaagcattggccataacgagacggtgaccattggcagtaaccgtctgcgggttgtgcgcaacaacgacacggtgatcgtgggcggtgccaagtccgacagcgccgccacgcattacaccatcgaggccggcgagagtcttcgcctggtgtgcggcgacagcgtgattgagctcaaggctggcggcgacatcaacctgacctgtggctcgttcaacctgttttccaccggcagcagcaagatccagacaaagggaaaattggacatcaacctgggcagtgacaagggcacatcgcccggtgcccaaggcgtgcaaagcacgatcaagtccgccgtcgaatcaaaatttcccggtaagcccggtgctggtcaataacgagatttcgccaccatgaactacctgatcaacgaagcccaattcaccctgcccgatgtcgaggtacaggacacttcgatcaatatcctcaagttcgccaagctgggcaccaccttggtggtgagccgcagccccttggccgatggcgagagcctgcaaagcaatttcgaaggccagctgaaaaagcttgaacagcaggtccaggaccttcgctattccccggcgcaagcggtcaaggtcggcccggcgcaggacatcgacgcgtttgaagtgcagaaccacttcagcaaaggcagcgacaacatttaccaatatcagctggccatgcagataccgggcacgcgtcgcttgatcgccctcagttacgtcaaggcccagcccctgggctcggccgaggcggcgcactgggcaacgctgaaaagcacactcaactttctcgccacgccttgagtcgagcttgagcaatgagtgaggatctttgggccgcccgcgaaggcgacgcactgctgcacacctcggtgatggccgacattctcggtggtgtactggaagtggccgcctacgcggcgatcactaccgtgggctgcctggccgttgccggggcggtgttcctcgcgactggtgcaaccatcgccaccggcggtgtggccctggtgttggtggtgggcgcggtcgtcggtattaccgctggcctcacgggggcggacttgaagatatccagttggtgcgagtccgccgccaactgggtgttcccgccggtgatcgatgcattcatcaccagcggctcgcacaatgtgttcatcaatggcaaaaaggctgcccgcgctgccggcaagatgaccgctgtgccggtcgcgcccagcgagccgccggcacccagcttcctggacatggccggggagtttttctcgcagatgtggcgcccgaccgtcgcctcgcccgcccccggcaccgagccgtgcccgctggacaccgtggcgtgcaacaagcatccgcctatgccgctgcagttcattgccgagggttccagttcggtgttcatcaacgggcagcctgccgcgcgcagcggggatcgcagtacctgcgannnnnnnnnnnnnnnnnnnnnnnnnnnnnnnnnnnnnnnnnnnnnnnnnnnnnnnnnnnnnnnnnnnnnnnnnnnnnnnnnnnnnnnnnnnnnnnnnnnnnnnnnnnnnnnnnnnnnnnnnnnnnnnnnnnnnnnnnnnnnnnnnnnnnnnnnnnnnnnnnnnnnnnnnnnnnnnnnnnnnnnnnnnnnnnnnnnnnnnnnnnnnnnnnnnnnnnnnnnnnnnnnnnnnnnnnnnnnnngcgttggtgggtggcgcgatctcttacgggaccgccaaggtcacctcggcactcaagagcgccatgcatggctcgcccaatccggtgcacagtgcgacgggggccaaggtcttgggcgaagaggaggagctggactttgtcctgcccggtctgctccctatcgattggcaacgtttctacaacagtctcgatacacgtcgcgatggcctcttcggcgcaggctggagcgtcgactatgaggtgtccgtcgaaatagatgccgacgaaaacctgttctatatcgatgagcagggacggcgcctggagatcggttatatcccgttgtccggtggcgcgttcgatcccggcgaaggcctcgcggtgagacgcaacggcgacggcgcggtattgatcgagagcatcgacggcctttatcggctgttcgagcccgatccgctgaacagttcacggatgcgcttgcacttgttgggtgatcgcaatgaaggtcggatcttccttgattacgatgcccaaggacggctgtgccgcctacgcgacacccatgacttgatgcacgtcgacctgagctacaccgcagagcatcctgggcgtgtaagccatatcgaacgccgttacctgcgccaggagcatttcgatgggcgctgcgacgtgctcgtcagttatcgctatgacagcaacggtgatcttgccgaagtcttggacgcccagggcacgaccctacgacgctttgcctacgacagcagcagacgcatggtcgagcaccaattggcgagtggtctgcgttgcttctaccaatgggctcaagtacctggaccagacggccaggaatggcgcgtcagtcggcactggacagatgcgggcgatgaatacaccttcgactacgacttggatgcgggcattacacgcgtcaccgatgggttgatgcgcgtcagcactcggcattggaacccgcaatatcagatcacccgatacgttgataacgcgggcaatatctgggaattcgaatggaacgaagatcgccagtttgtaggcgcgattgacccaaaaaatggcagatggcgcttctgttacgacgactccggcaatctgagtacagtgaccgatccactgggcaggacccatggcacacaatggcttgcgcattgggcattgcctcagattgaaaccgaccctgcgggcaatagttggcattaccgctacgaccaacgtggcaactgcattgaggaagtcgatccactgggcaaccgcacgcgctatgtctatgacggtttcggacagccggtgcgcatcattgatgcgacggaaaaaaccagaacattgcattggaacgagtggagccaactggtcgaagaagtcgattgctccggttatccgacgcgttatcaatatgacgcgtttggcaatctggtggtgcagaccaatgccgaaggtgaatcggtgcgctaccgatacggacctcagggactattgctggaatgccagcttccagatggtcgcgtggagcaatttcaacgtagcaccagtggttatctgacggcttacatcgacccggccggtagcaccacgcgctatgcctatgacgtacgcggcctggtcaagcaacgctgggatgcgcataaccgcacggtcatgttcgatcatgacgcctacgggcgacttcgcaagctgacaaacgagaacggagaaagctaccgctttgaatgggacgcggccgaccgtatggtgcagcagcaagacctggataaaagccggcgctgctatacctatgatccgctgaatgatgtcatcgccgttgactacctgcctgggacggaaggtgagccggtagcgccgctgtcacatcagtttcagcgagatgcagtgggacgcctgaccagtaaaatcactgcggacggcactaccgtttatcagcatgatccgaacgatcaactggtaagcgtcactttcacagcgcttgacggtgcagagcaggtactgggctttcgctatgacgcgctggggcaaatggtacaggagcaaagcacagcaggatccttgcggcatcactatgacgagttgggcaacctgattcagacccagttgcccgacggtcgttggctgaaccgcctgtactacggcagtggccatctgcatcagttgaatctcgatggaaaggtcatcagcgacttcgagcgtgatcgcttgcatcgcgaagtacagcgtacccagggtcaactcaagacaagcactacgtacgaccgtagcggaagggttcggtcccgacagcgtcgcagcatcgaccagccatggcagttgccccccttggtcgagaccgattacacctacgaccccagtgataatctgctcgggcgtcgtcgtattgaccgtcaagagcacctgggctacgacagtacgggacgtatcctctcaagccaccaagcgggacacagcgaaacctatgcctacgatgctgccgccaatttactcgacagcccgagccaaagtggtttggtacgacataaccggctgctcacttatcaggacaaacgttacaagtacgacgccctcgggcggatgatcgaaaagcgcagcgcggcgcggggtttgcaacgatttgcttacgatgccgaaaaccggttagtggaagtgcgcaatgaaaacagcagcgtggtcaggatggcctatgacccgctgggccggcgtaatgaaaaaaccgagcacgacagtaacggctatccgctgggcgagacccgcttcatctgggatggcctgcgtctgttgcaggagcaaaaataccgccagaccagcctttatatttatgaagacgaaggttatgaaccactcgctcgtgtcgacggtattggcccgctgcaaaaaatccgctattaccataacgacctcaatggcttgccggaacagctcaccgaggccgatggtcatgatgtttggcgtgctacttatcgggtgtggggtagcacgctgacggaggagcgcgaaccgtcctatattgaagagcagaatttgaggttccaggggcagtatctggaccgagagactgggctgcatttcaatacgttcaggttttacgatcccgctgtggggtgctttactacacccgacccgattgggctggcgggcgggggcaacctttaccagtacgcccccaatccgacaggctggatagatccattgggttgggcttgttcctccgcacaacggcgacagaataaagccaacggtaaagcagccgaaaacttggtgcataaaaaactcctcaacaaccctaatgtcactgtactcggtacacaggtgtacatcagaacccccggggcggggcggggccgttatgtagatattcttataagaaataacaagactggaaaaattgtcgccgtcgaagtcaagtcaggcggggcggtacgatctaaagctcagctagcaaaagataaaattatcacagacggaaaaggtattttcggaagctctggaaaaagcaccaaaggcgtaaccgtcagcgaagccagggttccattatggaggttgccgtagtgacagaatctacaaaaaacatactaaaagcacttacagattttttgacagttccatttaacgaaaacgggtatatcctgaaaaaagatcgatactttgaacacgtagaacagaatggtcggattcgtcgatatgctataaacctatctaataaaaaaggctggttctctctccacctgacgctacaaatgcttgatccagctctaatgaaaagcgttaacatcatccttgaaaaagcactcagggatgaaagacttgaatatccggaaaactggtcgcagtcaattatcgaaaagacaataaaaacccgaacgtctaatcacattgtcgccgagctcaccgattggcgagggttaaaagaccccagcgaaccgcttgagcatttcaataaacggttctccatatggttgtactcattcgaccatttggatgaaatgcctgattgggaagagcaattaatggcgagctttgaattggcaatgatttggtttagagaggtcgattcagacgactggatccgttccaatactgtttacccttctctgtatcttctcaacaaggaagggctcaagcaaagccttgagaaacaatacagggcaacattacagtcatcggaagatccacaggaagtaaaattatttcacgaatacttgccataaaaaaccagtgcaacacagcacaaatgaacggttttatttaaacccacgaccataaaacaaacgaccgcaaaatgcgagccgaaagggccggatcaattcaaggccgagctcgcagagcttaggaaggaggcactggaccctacctccacgcttaataagattttgaggaaagtagacttatgaattacttcaaacttaatccaaacgttaccagtaaaaagtgggaaggttatgtaaacctgggagggctcttttataaaggagaggaattagacgatgtcgagctgtctaatagtagaacgccttgtgtcttcgaacccctgcactacgagattctcctagatggaaaaacagctccggtcaacaccatcggggctgatttttttgtattcgacgaagctctccaaggattggataacttgctgacggagcatgtgcaatttttgcccatcagccacgaaaaacaaaacgtgcgttatcgtcttcttcacgcttacaaacatgtcgattgcgtcgattgggcgctgtcagaatacgaggcgtggcccgaatcacatgtggtcaaagagtggcaaaatccaagaggtcgtttctttttcaacccaacattaagcatagacaaaatcccaaaaaaaacagaggtttttcgcttagagggctggggcggagctttcaacatcgtcatttgcgaagcgtataaaaataagttgcagggctttgactttgaccattctcttttggaatttcaccctattattcttgtgtgacccaaacttattcattaggcagattattcaaaatgaatacccataagataaattaagttaatccgtcccctttaccattctcgttgacttcgaactgtgcaaattggattgggtaacgtttatatggttttgaaaggggaaatcccaataccgaaaggtgggttcatccaactatcgctatagaccaaggccagcctttttcaattttttagcaggttccgtggattacctgttgagtaagtgctattcaaacccgtccctgcctgtccgaacatatagcgggcaaaagaaagaaggctttttcaacgagaaggaggagaggtttattcaataaataacggggcctaagcaactgccaaaatcgaataacctccccgcctattcgtccctttacttaaacgcctagttttttctttgccttttgttcctggatagttttcagcaaatcgactttttcatctatataagcttggcgcttttcaatattgtccatacgagactgctcagtcggcgcttctgatgactcaggagttacatacggtttgtagagaatgtcgaaccgctcggcgagctctggcatttgcttttcgatttcatccagcgtcttctcaatattgctcaagcgcccttctgtatcagtaggcgcatcatcgctcggctgcacccctatcgcgtcgcgccctaaagccagaaaaataaacaggttggccgtcgcctcattttttatttcagcgccggtgaggcgagcctccattttttgctctttcgttgcagcaggatctacagttccaatcgtgccatctgcgttctgtacttccgcccctggcatttcactgtacgctgcaaatttattctggaaatagctggacgagaattgctgtccgacagtaaaggggctactgaccatgttgtctgccgcggcgcttataaaagcattacgtacagtggctgctactgatggaggcgctggaggcaagctctgtggctggctgacaatactttgtattgtgcttacggtaggcttcggactgttcggtgtaccacttggcaatggcgtagtcggcctatgctgcgaaggcgacacgggcggtttattctgcgaagttggtttattctgcgaagttggtttgtgctgcgaagttggtttgtcctgcgaagttggtttgtcctgcgaagttggtttgtcctgagaagttggtttgtcctgcgaagttggtttattcggcggagttggtgtattcggcacgggctgcctacgagacggaggcctcttggagccgcgaccagaacggctagatccaagtactccaaatccagctccacgagacttggcagtatcaagctcggatacaccagcgctaaggttattagcaactgcagcatcggcacgtttgtttttagcagcgatttcttcaggggtcgccagtgggtatttaagggccttctcgttcgcggcactagagtcacgttcaacgttagaactgtctgctactgtgccggcagtacccgaggccgctggagcattcgcctccacttttttctcttgaggtaaaaaggaagatggaacaaaaggctgatcaattttcatatacacacctctaaaatgagttagagccgctccctgctgtctcgcgctatatgtgtcttcttgtacagatgtagttccacagtgaagtaaaaaacataaaccataaacagtgattcaagtagtcgctactgtatttattaatacctaagcaagaggcaacgactgttattccaccgggaacgcttctaacacccaacaaaaatgggcacccgaccccgtcggcgtgcccattttctttaccgccccgcctcccttcgagacggtaccgcttaacttacgggttgacgctgtctttgagcgacttgcctggcttgaaagcgacggtgttgctggccttgatcttcactggctcaccggtttgcgggtttttgccggtgcgggcgccgcggtggcgttgcaggaaggtgccgaagccgaccagggtgacgctgtccttgcggtgcagggcgccggtgatttcttcaaggacggcgttgaggacgcggttggcctgttctttggtgagatcggctttttcagcgatggcggctgcgagatctggtttacgcataggtgaagcctctttgacggttttttgttgttatgtccgtgctgctctctggtggagcagcgccaaggcgccgcaggctctactctgcggcagacgggagtgaggatggcatgccctcgggcgccgcgccagtctcgcggcggcctttctccgggtatgaacgtgatgtttgcgacagaacggctggtatttacgccagtaacggcggaagttctttgttcagcgccagtttttccatgacggcgctgccggtcagtgcgtaacccagcaggcggccgctggcatcgcggcacagggccttgatgtcggcaccctgcccttcgacgctccacacaccttcggtgccccgtggcgcaggagacaccaccagcgggcacaccggggttttcaccgtgatcggcataggcccatagctcaccgccgtggcattgccggccaaggtttgcgccagggcgcgggcgcagctcatcaatggcatcacgtacaacaggttcagaccatcaacctctgcgcagtcgcccaaggcgtagatgttggcgtgggaggtcttgaggtggcggtccaccatgatgccgcggttgatttgcaggccggcggctgcggccaagtccacgcgagggcgcaggccaatggcggacaccaccaggtcacagtggatcacttcgccgtccgacaggtgcgcttcaaggccatcagccgtgcgttgcaggcgattgagcaccgggcccaggtggaaacgcgcgccgatgccttccagcccggcttgcaccgctgcggctgccgccgggtgcagcagggtcggcatgacttgctcacacggcgcgaccaggtcgatttcatagccgcccaggatcagatcattggcaaactcacaaccgatcaggccggcgccgagcagcagtacgcgtcgtttaccggcagcggcggcacgaaagcgcgcgtagtcttccaggtcattgatcgggaaaatcaactcagccgcatcgccttcgaccggtacgcgcacggtttctgcgccccaggccaggaccaggtcgcggtaggtcactgcttcctcgccgatccacagacgcttgtggcctgggtcgatgccgctgatgcgtgtatgggtgcgcacttgggccttgagttgctcggccatcgcgccaggctcggccatgctcaggccatcggcttccttgttcttgccaaagccggtggagagcatgggcttggagtaggagcgtccgtcatcggcagtgatcagcagcaatggggtctcgctatcgagcttgcgaaactcccgggcgacgttgtaaccggccaatcctgtgccgatgatcacgacaggtgcgttcattcccttctccttgtagtacgtttcttaattcgttgattagccgatttcgatcatttcgaaatccattttgcccacaccgcagtccgggcacagccagtcttccgggacgtcctgccacagagtgcctggtgcaataccgtcatccggccagccgtccgcttcgttgtaaataaggccacagacgatacattgccacttcttcattacgtgcttcctcaggttcaggcgtgttggccggcggtcgatggatccagcgttgccgcgcggctcagggcgttttgtactgatcggggcctgcagatgcaagcatgttcgacgcaaacgacgggtttggcacggcaaaagcccagggtgccatggtaagctcgcggcctcttttgctgccaatactgactcaccgtgccgcactcaatcgcccttcccgatgcttgccaatggctgacccagagccttctgagccccttgcccacgcccttgaccctcaattggctgtttgacgaaggctcgctgacgcgacggctgacgtggctttccaacgagggtttcagcgtgacgccgctgttcgaaggctggcaaccgttgcgcgacgacgaatgtgccgcgctggacctgccgccggccagtatcggttgggtacgcgaggtgtatttgcgcgggcacggccagccttgggtgttcgcccgcagcgtggcggcccgcagtgccttgcagggcgacgggctgcacatggacgagctgggcagccgttcgctgggcgagttgctgttctgcgaccgcgcctttacccgccaggctattgaagtgtgtcactaccctcgtgcctggctgccaacagcggaccaggccgataacctgtgggcgcgccgctcgcgcttcgaccgcggggcgctgagcgtgctggtggcggaagtattcctgccgagtttctggcacgcgttgcacgatcatccggagaactgctgatgtaccaacgtctgctcaagtccttgaaccgcctgaaccccagggcctgggatttcattcagttgacgcgcatggacaagcccatcggcatctacctgctgctgtggccgacactgtgggccctgtggatcgccggcaagggctcgccgtcgctgatcaatatcgtgattttcgtgctgggcgtggtactcacccgggccggcggctgcgtgatcaatgactgggccgaccgcaaggtcgatggccatgtgaaacgcaccgagcaacgcccgctggtgagcggcaagatcagttcgaaagaagcgctggtgttttttgccgtgctgatgggcatcagtttcctgctggtgctgctgaccaacgccagcaccatcctgctctccctgggcggcctggctctggcggcaagttacccattcatgaagcgctacacctattacccccaagtggtgctgggcgcggcgttttcctggggcatgccgatggcgtttaccgccgagaccggccatttgcctgccacggcgtggctgctgtacatcgccaacctgttgtggacggtgggctacgacacctattacgccatgaccgaccgcgatgacgacttgaagatcggggtgaaatccaccgccattctatttggcgatgccgaccgcgtgatcatcctcacgttgcaaggcctggcgctggcgtgtctgttgctggccggcgcgcggttcgagctgggcgggtggttccacctggggctgctggcggcagcgggctgttttgcctgggagttctggtacacacgggacagggaccgcatgaagtgcttcaaggcgttcttgcataaccactgggccgggttagcgatttttatcgggattgtggtggattacgcggttcgctgaggattctgtggtgactgttgggacgccatcgcaggcaagccagctcccacattttgactgtattcgcagatcaaaaaattgggagaggcttgccccccgatggattcagcagcgccgcagacttaaggcttgatgatgtgccagacgctacccttcccatcaccggtcttgtcaccggctttcttgtcgtccttgtaggtatagacaggcttgcctttgtaggcccactggctggtctggtcgtcgcgggtgatcaccgtccaatcgccggtcttggtgtcggtggattctgctttcagcggtggccagttggtcgcgcactggtccttgcacactgatttgccatcagcgtccttgtcgaaggtgtagagcgtcatccccttgtgatccaccaacatcccgtctttggtcatcgccggctctgccgcaaacgccaggcctggcagcgtcaacaccgcagataccagcagggctttccaggaaacagtgctgtaagtcatcggaaccttccttttgtggttgtcaggattcggacccaaagggtagtccagagtgccgttaattgcccaagcgactaaattactgtcacacgactgcaataattccgttatctaatgcggcgcaagacagttaaatgacaagaggattgagcatggttggcaggagcattctgatcgttgacgacgaagcgcccattcgcgaaatgatcgccgtcgcgttggaaatggccggctatgactgcctggaggcggagaactcccagcaggcccacgccattatcgtcgaccgcaagccggacctgattctgctcgactggatgctgcccggcacctcgggcatcgagttggcccgccgtctcaagcgtgacgagctgaccggggatatcccgatcatcatgctcaccgccaagggcgaagaggacaacaagatccagggcctggaagtcggcgccgatgactacatcaccaagccgttttccccacgggaactggtggcacgcctcaaagccgtgctgcgccgtgccggcccgaccgatggcgaagcgcctatcgaagtcgacggcttgatcctggacccgatcagccaccgcgtgaccatcgacggcaagcctgcggaaatggggccgaccgaataccgcctgctgcaattcttcatgacccaccaggagcgcgcctacacccgtggccaactgctcgaccaggtgtggggcggcaacgtctatgtggaagagcgcacggtggatgtgcatatccgccgcctgcgcaaagccttgggcgatgcgtacgagaatctggtacaaaccgtgcgcggcaccggctatcgattttctaccaaaggctgagccagccgtttcgtgaatcaatagcctgacttaaacagctgacaaggacgcatgttcaagtgaatcaaaactggcatggcaccctgatccgccacatgctcttgctggtcaccggctgcctgttggtggggctggtcagcggctactacggctggagcctggccgcgggcattgccttgtacctgggctggaccctcaagcagttgctgcgcttgcatgaatggctgcgccagcacaaacccgatgaagcaccgcccgatggctacggcctgtggggcgaggtgttcgacagcatctaccacctgcaacgccgcgaccaacgggtacgcgggcggctgcaagcggtgatcgaccgggtgcaggagtccaccgccgcgctcaaggacgcggtgatcatgctcgacagcgacggcaacctggaatggtggaaccgtgccgccgagaccctgctgggcctcaagacgccccaggacagcggccagccggtgaccaacctggtgcgccacccgcgcttcaaggaatacttcgagcaggacaactacgaagaagccctggaaattccctcgcctaccaacgaccgcgttcgcatccagttgtacctgacgcgctacggcaacaacgaacacttgatgctggtgcgtgatgtgacccgtatccatcagttggaacagatgcgtaaagacttcgtcgccaacgtctcccacgagcttcgcacaccgctgacggtgatctgcggctacctggagacgctgctggacaatgtcgacgagatcaacccgcgctggagccgcgccctgcaacagatgcagcagcaaggctcacgcatgcagaccctgctcaacgacctgctgttgctggccaagcttgaagccacggactacccctcggacaaccaccccgtggctgtgcagagcctgttgcagacgatcaagaacgatgcccaggccctctcgggcgaacgcgggcagcagatcacgctggaggccgacccaaccgtattgctcaagggcagcgaaggcgaattgcgcagcgccttctccaacttggtgttcaatgcggtgaagtacacccaggacaagggcaatatccgcattcgctggtgggccgacgagcacggcgcgcacctgagtgtgcaggactcgggtatcggtatcgacgccaagcacctgccgcgcctgaccgaacgcttctaccgtgtcgactccagccgcaactccaacaccggcggcaccggtctgggcctggccatcgtcaagcatgtactgctgcgccatcgggcccgcctggaaatcagcagcgtgctgggacatggcagtacctttacctgccattttccgccggcgcaggtgacccgtgagcgagcggtcgaggccgataattaagttgaagtgagcacggcctaatgtgggagctggctctgcgacacgactttgcagccccgcccggcagcgggcactaggcaagcgccccgtcagccgctacattggccgacttgtgcctgcctttcaggcccacctgtcaccccttattgaacacacggaacctgcaaaaccccatcatggacccttcccctggcattaccctggctacactcttcgccgatttcggcatgattctttttgcactgatcctggtactgctcaacggcttcttcgttgcggcggaatttgccatggtcaaactgcgcgccacccgcgtcgaggccatcgcccataagaacggctggcgcgggcagatcctgcgtaccgtgcacagccagctcgacgcctacctgtcggcctgccagctgggtatcaccctggcgtccctgggcctgggctgggtcggtgaaccggcctttgcgcacatcctcgagccgatgctgggcgcggtcggcgtgcagtcgccggaagtgatcaagggcgtgtcgttctttgccgccttcttcgtgatttcctacctgcacatcgtggtcggcgaactggcccccaagtcctgggcgatccgcaaacccgagctgctgtcgctgtggacggccgtgccgctgtacctgttctactgggcgatgtacccggccatctacctgctcaacgccagtgccaacgccattttgcgcatcgctggccaaggcgagcctggcccgcaccatgagcaccattacagccgcgaagaactcaagctgatcctgcactccagccgtggccaggaccccagcgaccaaggcatgcgcgtactggcctccgccgtggaaatgggcgagctggaagtggtggactgggccaactcccgggaagacctggtgaccctggatttcaacgccccgctcaaggaaatcctcgcgctgttccgtcgtcacaaattcagccgttacccggtgtatgacgcggtgcgcaacgagtttgtcggcttgttgcacatcaaggatttgctgctggagctggcggccctggaccatatccccgaatcgttcaacctggccgaattgacccgcccgctggaacgcgtatcgcggcatatgccgttgtcgcaactgctggagcagttccgcaaaggcggcgcgcacttcgccctggtggaagaagccgacggcaagatcatcggctacctgaccatggaagacgtactggaagtgctggtgggcgatatccaggacgaacaccgcaaggccgagcgcggcatcctcgcctaccagcccggcaaactgctggtgcgtggcgacacgccgttgttcaaggtggagcgcctgttgggcgtcgacctggaccacatcgaagccgaaaccctggccggcctgatctacgacacgctcaagcgcgtgccggaagaagaggaagtgctggaagtggaaggcttgcggatcatcatcaagaagatgaaagggccgaagatcgtactggccaaggtgctgctgctggactgactgcaggcgcagtgctgtgtgtgggagcgggcttgcccgcgatagcggtgggtcagccagcgcatcgttgactgatagattgctatcgcgggcaagcccgctcccacatggaccaagcgtcgccttgaagggtcacgcacccggcacgaaatgcttctgcgccgtgccacgggcgatcaggcgggaaatgtaatccagcttctgcgcatcctggtcgataaagcggaaggtcagttgcaaccagtcgctgtcgggcttgggctcgtaggcgacgatggcgtgcaggtagccgttgagccgtgcgacttcggcgttgtcgccctgctcaaggtcgagcacggcgctttccagtacctgaggcaggacctcgccacgctttaccaccagcaacgcctccttgatgctcagggccttgatcacgcattgctgagtgccgcttgcgaggcgcaactggccctgaccgcgactgccagccggcgccgctgccgcgggggccttgacgggcggggtgttgagcaggcctttgctgggcgccgccaccggggccggcttgaccgcttcgggtttgccgccggtcagggcgctcagggagtcgttgccgaaggctgagttcatcttggtcggcgcgctggcaatcagtgcatcgaggcgaccgatcttgtgcagggcctgcttgaccttgttgagcaactgctcgttggtgaacggcttgctgacgtagccggaaacgcctgcctggatggcctgcaccacgttttccttgtcgccacgactagtcaccatcacgaacggcatggccttcaggtgggcttgctcgcggcaccaggtcaacagctcaaggccggacatttccggcatttcccagtcacacagcaccaggtcgaaggtttcgcgcatcaggatggattgcgcctttttgccgttcaccgcatcttcgatcttgatcccagggaagtaattgcgcaggcacttcttcaccaggtcgcgaataaacgaggcgtcatccaccaccaacacactgactttactcatcgacccttcatcctataaaaacgtctgcaaaacgcctgactgatggcattttgccaaaactcgcgggtcacagaaggactttatggcgcctgctgtgcaaaaaattcagatgccacaaacgaaaacgcccggccagaggccgggcgttaatttctcgggcaaccttacttatcgtcagattcgcccgaaacattagggattagatcagcagtgccttcaacttcggctttcatgcgcttgaggcccatgtgccgcacgtcggtgccgcgcaccagataaatcaccagttccgagatattgcgcgcatggtcgccgatacgctccagggaacgcagcacccaaatgatgttcaagactcgcgagatcgagcgcgggtcttccatcatgtaagtggccaactcgcgcagcgcagtcttgtattcgcggtcgatgattttgtcgtactgggccacagacaacgccagttcggcgtcaaagcgagcgaaggcgtcgagggcatcacgcaccatgttgcgcacctgatcgccgatatggcgcacttccacgtagccacgaggggcttcaccctcctcgcacagctggatggcgcggcgggcaatcttggtggcttcgtcaccgatgcgctccaggtcgatcaccgacttggaaatgctgatgatcaaacgcaggtccgaggccgccggctggcgacgggcgagaatgcgcaggcactcttcgtcgatattgcgttccatctggttgatctgctcatcaatctcacgcacctgctgggccaggcccgagtcggcctcgatcagcgcggtgaccgcatcgttgacttgcttctccaccagcccgcccatcgccaggaggtggctgcgcacttcctcaagctcggcattgaactgcgcggagatgtggtgggtaaggccttctttgctaatcatgttggcgtccttggagcgtccggtaaggtgcggagaaccgcagcgtcagtgcaatcagaaccacagcttcctagccgtagcgaccggtgatgtagtcttcggtctgcttcttcgccggattggtgaacagggtgtcggtatcaccgaactccaccagcttgcccatgtacatgaacgcggtgtagtcggaaacccgcgccgcctgttgcatgttgtgggtgacgatgacgatggtgaacttggacttgagctcgtagatcagctcttcgactttcagggtggagatcgggtcgagggccgagcacggttcgtcgagcagcaacacttccggctctacggcgatggtacgggcgatcaccagacgctgctgctggccgccggacaagccgagtgccgattcgtgcaggcggtccttgacctcgtcccacaatgccgcgcccttgagcgcccattcaaccgcttcgtcgaggatgcgtttcttgttgatgccctggatacgcaggccgtagaccacgttttcgtagatggtcttggggaacgggttgggcttctggaacaccatgcccacgcggcgacgcagctcggccacgtcttcgcccttgcggtagatattggtgccgtagaggttgatcgcaccttctacacggcaaccgtccaccaggtcattcatgcggttgaaggttcgcagcagcgtggacttgccgcagcccgacgggccgatgaaggcggtcacgcgttgcttggggatgttcatgctgacgtcgaacaacgcctgcttgtcgccgtagtacaggctcaggccagggacttcgatggccacggtttcctgggccaggctcaggctctgcttgtcgcgacccagggcagacatgttgatgccgtgggattgggtttcgtgttgcatgggatgctccctgtgctaccaattcatttcgttgaaccgccggggcggcttactcaaattctgtgcctgtgggagctggcttgccttcgatggcatcactgcggtcttactgatacaccgcgtcgtctgcatcgcaggcaagccagctcccacattggatcgcattaactgtccaacgccttgtacttctcgcgcaggtggttacgaatccacaccgccgacaggttgagcgtggcgatcaccagtaccagcagcaaggcagtggcgtacaccaacggccgtgcggcttcgacgttggggctctggaagccgacgtcatagatatggaagcccaggtgcatgatcttctggtccaggtgcaggtacggatagttaccgtccagcggcagcgacggcgccagcttcactacacccaccaacatcagtggtgccacctcaccggcggcacgcgccacggcgaggatcatgccggtcatcattgccgggctggccatcggcagcacgatcttccacagcgtttccgccttggtcgcgccgagtgccagggagccttcacgcacagtgcggggaatgcgcgccaagccttcttcggtggccacgatcaccaccggcaccgccagcagggccagggtcagcgaggcccagagcagccccggcgtaccgaaggtcggcgccggcagggcttcagcgaagaacagacggtcgaccgagccccccaatacatacacgaagaagcccaggccgaaaacgccgtagacgatagccggtacaccggccaggttgttcacggcgatgcggatgatgcgggtcaaggtgttctgcttggcgtattcacgcaggtacaccgcggccagtacgccaaacggggtcacgatcattgccatgatcagggtcatcatcacggtgccgaagatggccgggaagatcccgccttcggtgttggcttcccgtgggtcatcactgaggaattcccagaccttgctgaagtagaagccgattttggtcatggtgcccatggcgttcggctggtaggcgtgcaccactttgccgataccgatttccacttccttaccgttgccgtcacgtgcggtgagggcgtcgcggttgaactgtgcgtgcaggtcggccaggcgcgcttcgatgtcttggtagcgggcgttcagctcagcgcggtcggcgtccatgtcggcctgggcggctgcgtcgagcttgccttccagttccagtttgcgaccgtgcaggcggatgcgctccagcccggcgttgatcgcgccgatatcggatttttccaaggtcttgagctgagcggcgagcttgttcacacgctcgacacgcgcctgcagttccggccacgcagcttcgccttcagcgataaccttgccatcctgcttgacgttgaccagggtgccgtagaagttgccccactcacgacgctcgatggccatcaggttcgcaggcttggtctggtccttcagccactcgccgacgatccaggtgaaatcgttgccgttcaggtcgcggttgccgaccttgatcagctcacgggtcatgaattccgggccttggtccggcaccggcaggcccgcgcttttcaggcgctcacgcggcacttcttctttctgcaccacttcgccgatcacgatgtggttggcctggcctggcacgttgtagttggcctggatcaggtcggccggccagaaatggcccaggccccgcaccgcaatcacagccagcaaaccaatggtcatgatgaccgcgatggacaccgcgccaccgctgatccagacgccgggggcgccgctcttgaaccatccattcagggagttctgtttcacagacttctacctttcttaaagcgacgagtatttcttgcgcagacgctgacgaatcagctcggcgagggtgttcatgatgaaggtgaataacagcagcaccagcgccgagaggaacagcacgcggtaatgactgccgcccacttccgactcgggcatctccaccgcaacgttggccgccagggtgcgcaggccctcgaacaggttcatctccatcaccggggtgttgccggtggccatcagcacgatcatggtctcgcccacggcgcggcccataccgatcatcagcgccgagaagatgcccgggctggcagtgaggatgaccacgcgggtcatggtctgccacggcgtggcacccagggccagggagcccagggtcaggccgcgcggcacgctgaacacggcgtcttcggcgatggagtagatgttcgggatcaccgcaaaacccatggccaggccgaccaccaacgcgttgcgctggtcgtaggtaatgcccagatcgtgggagatccacatgcgcatgtcaccgccgaagaaccaggtttccaggtacgggctcatgtacagcgagagccagcccacgaacaggatcaccgggatgagaatcgcgctttcccacccatcgggaacacgcaggcggatcgactcaggcaaacggctgaagacaaagccggcgaccaggatgccaatcggcaacagcatcaacaggctgaaaatgcccggcaggtgcccttccacatacggcgccaggaacaggccggcgaagaagccgaggatcaccgtcggcatggcttccatcagctcgatcaccggcttgaccttgcggcgcaggctcggtgccatgaagtaagcggtgtagatcgctgcagcaaccgccagtggcgccgccagcagcatggcgtagaacgcagccttcaaggtaccgaaggtcaacggagccaggctcatcttgggttcgaagtcagtgttggcggccgtagattgccagacgtatttaggctcgtcgtagttctcgtaccagaccttgctccacaacgcgctccacgacacttccgggtgcgggttgtcgagcagcaacggttgcagcttgccacccgcctcgacgatcacacggttggcccgtggcgacatgccgaacaggccctggccgtcgaccaccgggtccaccagcaaggtgcggtgggcggtgctgtggaacacgccgaactggccagcagcatccagggcggtgaagcctttgcggcgctcttcagcgctgatttcgacgatgggcgcagtgcccatctggaaggtgcggatctgtttcaggcgctgttcgccatccgcatctcgggccatgaaccactgggccaggccgcctttggagttacccaggatcagcgagataccaccaaccaactgggtgctggcggtgatttccgtgtcggcgtcttccagcagtttgtagcgaccgttgaggctcttgtcgcgcaggctgaacacgtcggccagggcacggccgttgatcacgtaaagccactgctggcgtgggtcgatgaagatcgccttcaccggctcggtcatctgcggcagctcgacacgcttctgctcgctggtgacttcaccggtcatcatgttttcttcgcggctcagggtcagcacgttcaagtgcgaaccagcggaacctgccaccaccagcgaggtgtcggtggcgttgagcgcgacgtgttccagagcgcgaccggcgtcatccagcacgatcggcgtttcgccgtaggggtattcgattgccggggtgatggttttcttgccgtccgggtacgacaccttataggtgtggcggaacaccagggactggccattggacaagccgaggatcaccagcgggctgcccggctggtcttcaccaatggaagcaacgctggtaccggcgggaatcggcaggtcgacacgcttgagctcggcaccggtgtccacggcaaagaacagcgcctggcccttgtcggaaacccgcatggcgacttggttctgttcttcgagggaaatcatcaacggcttgccggcgtcttgcatccaggcgggcgtcaacgcgtcttccttggtcaacgaggcgccctggaacaggggcgcgaccacgtaggcgaggaagaagaagatcagggtaatggcagccagcacggcgaggccgccgaccagcacataccaacgggtgaagcgatccttgagcgcgcgaatgcggcgcttgcgttgcagctcaggcgtattgaaatcaatgcgcttgggaggggaagtcgtcgtcatggtggaattggccagatcattcatgcgcacaccctagcgatcctgtatgacagaaagatgacagtgcagtgacgcaacaaatccgccgcgaagcagggctggcagcggataaaaaattagggatgcagactgcttatgtgggagcgggcttgcccgcgatggcatcaacacgatttcaacgctaaaccgcgtcgccagcatcgcgggcaagcccgctcccacaaaaaagcatgcgtctacatcaggtatcgcaggcttagttgccttctttcaaacccaggtcagccagggccttggcggcgactttggctggcagtgggatgtagccgtctttgaccacgacttcctggccctgcttggacagcaccagtttcacgaactcagcttccagcggcgccagtggcttattcggggctttgttgacgtacacgtagaggaaacgcgacagcggatacttgccgttcagggcgttttcttcggagtcttcgatgtagtcagtgctgcctttcttggccagtggcacggtcttcacgctggcggtcttgtagccgatgcccgagtaaccgatgccgttcagcgaggagctgatcgactgcacaaccgaagccgagcccggttgttcgttcacgtttggcttgtagtcgcctttgcacagggcttcttccttgaagtagccgtaggtgccggataccgagttacgcccgaacagttgcactggcttgttggccaggtcgccggtcacgcccaggtcgccccaggttttcacatcagccttggcgccgcacagacgcgtcgacgagaagatcgcatcgacctgttccatggtcaggtgctggatcgggttgtccttgtgcacaaacaccgccaaggcatccacggcaaccgggatagcggttggcttgtagccgtacttctgctcgaaggccgcaagttccgtgtccttcatcttgcggctcatcgggcccaggttggaggtgccttcagtcaacgcaggtggcgccgtggcagagccggcagcttgaatctggatgttgacgttcgggtattcctttttgtaaccctcggcccacagggtcatcaggttagccagggtatcggaaccgacgctggacaggttacccgacacaccagtggtcttgacgtaagccgggattgccggatcaacaccagcggccaccgcgttggcggtcgcaacgccagcagcgacaaaagtcattgccgccatcaaacgtttcagtttcatgccttgctcctagcagatagggataattggatcggggccaagtatcggcaggccgtgtgaacactctatgtctgaaatatgacaattagatgaaaggccactatctgaatgtgcaggcttcagcgaccgcgtttccacagatacccgcctaccagcatccccatcacgcatagcacggctacgtaataagccgggcccatcgggctctccttcatcagcagcgacaccgccaagggcgtcaatccgccgaacacggcataagcaacgttgtaggagaacgacaggccgctgaagcgcaccaccggcgggaaggctttgaccatcacgtagggcactacgccgatggtgccgacaaacaggccggtcagggcatacaaggggaacagccagtcgggatgcgccatcaggctgtgatacagcgtccaggaagtcgccagcagcagtgcgcaaccggtgaccagcacgcggccggcgccaaaacggtcggccagcgcacctgcggcgatgcaacccaggctcaaggtcacgatggccaggctgttggcctgcagtgccaccgtggggctgaagtgatagatagtttgcagcacggtcggggtcatcaggatgactaccaccacgccggccgacaatagccaggtcagcagcatcgacagcacaatggcgccacggtgatcgcgcaacacggcgcgcaagggcagttcagcggccaggctcttgcgttgctgcatctcggcgaagatcggggtttcatgcagccaacgacgcaggtacaccgacagcaggccgaatacgccgccgagcaggaaaggaatccgccaggcgtaatcagagacctgttccggtgtataggcgctattgatggcggtagccaccaacgagcccagcagaataccggcggtgaggccgctggtcagggtgccgcaggcgtagccgatgtggcgcggcggcacgtgctcggagacgaacacccaggcgcccggtacttcgccgccaatcgctgcgccctggatgatgcgcatcaacagcagcagcagcggcgcccacaggccgatctgtgcataggtcggcagcaggcccatgatcagggtcggcacggccatcatgaagatgctcagggtgaacatcttcttgcggcccagcaggtcaccgaagtgcgccatgatgatgccgcccaaggggcgggccaggtagcctgcggcgaagatgccgaaggtctgcatcatgcgcagccattcgggcatgtcgacggggaagaacagcttcccaaccacggtggcgaaaaacacgaagatgatgaagtcgtagaactccagcgccccacccagggcagacagcgacagggttttgtagtcgttgcggttaagcggtcgtgcgggcggcgcaatgcttgaaggcactgtggtcatggcaaggcttctcttattagtcagatcaggaatccgcaacagcgtgggtttgcgcctggcaggtccggcacgatagcaaattgcccggaaaagcacagtccaaacccttgcgccgcatcagcgccacctcgcaagcatccccacttgcgaagcgccttattccctttccgaattgttatggggggccgaaaacgccatcagatactgacggccagcgctaaaaagaaacaatggtcaaacccctcaacttgaatgaccgttttggccaattttttgacgcctggaaactcgtctatatagatgcacaaaatcaggagcagatggtcgtcgcgcaggctatcgaccgatatactcccagccctgcacctgtctattgcgtggaagttgcgcgaaaccgtcgttggcaccggccagccgatttcgcagagtttccctcaaggcgcctttcgaaaaacgtgacgaacgtagtatgttcggggctgaatcgtttttccaagacggctattcaccgattacatagtccaagagtcacgggtcagaggcacccccggcatgatcgaactcgaacaagaagatcctatcccgcaaggcgatctcgccctgcaaatcaccgcgcttccgcgtgaaaccaacggctttggcgatatcttcggcggctggttggtcgcgcagatggacctggcgggcacggcaatggccagcaaggtcgccggtgggcgcgtggccaccgtggcgattgatcgcatggcgttcctggtgccggtggccgtgggtgcgcagctttccttctatacccaggccctggaaatcggccgcagctcgatccagatgatggtcgaagtgtggagcgacgatccgttgtccagcgaatggcgcaaggtgaccgaagccgtatttgtgttcgtcgccatcgatggcagcggccgcacgcgttcggtaccgtcacgggcgcgttaaacctcgccgggttttaacggtcaattgccccattgcctgccattaagagagctttgtcatgcctacgccccacgttgagacggtaaaaatcgacgagctggactgctggcgcatccgccacaacggtgccgagctgatggtggcccaacagggtgcgcatatcttcagttaccagcgcgagggcgaacagccgctgatctggccgaaccctgaggccgtgttcaagcagggcaaaggcattcgtaccggcgtaccggtgtgctggccgtggtttggggtgttcgaccgcaacccgcaaagcgtcagagccatgcgccagagcgatcagcctgccggcgcccacggttttgtgcgcaccgcgcgttgggagctggccaccaccgaactcgacggccagacgctgcgagtggacctggtattgccggtgccggcgggcggctttccaggctggccccatcaggtagacctgacgctgagcctgctgctggacgatcacctgcatatccgcctgaccagtcacaaccgtggcaccgacaccgtgaccctcagccaggcattgcacacctacttcgccgtgagcgatgtgcgcaaggtgcaggtcgagggcctggatggcgtggattacatcgataccgccgatgggtgggccgagaagcagcaagccgggctgctgcactttcgcgccgagacagaccgcatttacctgaatacgcctgcacagttgaatatcgttgatagcgactggcagcgccgtatccagctcaccagcgaaggctccaaatccaccgtggtctggaacccctggaccgaacgcgccaaggctttcgacgatatggccgatgacggctggcagggtatgttgtgcatcgagacagcgaatgtgctggatgatgtggtgaacctggcgcccggcgaaagccacaccttgggcgtgagcatcacggccctggccttgtaaacccaacccaatgtgggagctggcttgcctgcgatgcagacaactcgatgtgtcaggaacaccgaggcgctgctatcgcaggcaagccagctcccacaggggttatgctttgggctttagagatcagactcctgcaccacccgaaccttcccggcctccagcgcatacgcggcatccgccaagtcgttattgaccttctccaccttcaacgtgcccgtgacccacagcggcgtgtagatatcatccagcttcagccccttgggatagcgcaccagcaccagttggttaggcggcggtggcggcacgtgtatgcaggcgcccgggtaaggcaccaggaagaacagcgtgctgcggcccttggcgtccgtttcaagcggcaccgggtagccaccaatgcggatattcttgccgttcatcgccgccaccgtcttggtggaatacatcaccgcaggcaaacctttgctctgcttcaagccacccttttcggtgaacgtgccttgggcttcgggggagttgtggtcgatctcgggcatggcctcgagggctttctgatccgacagcggcatcaggtcgagccagtcggtttccggcagttcgccagcgtgcgccaggccagagctcagcagaagaagcgttaacagaagacggcgcatggagaggctcggcaaatacaagtgccgagcattctagccctctgcgcctgcgcagcgcagaggactttgtcggctgattacttctttttgaccaggccgtagatcaccagcaacacgatggcacctaccagcgcgccgatgaagcctgcgccctggcctgcctggtagatccccagggcctgaccgccgtaggtcgcggccagggaaccggcgatacccagcaggatggtcatgatccagcccatgctgtcgtcgccaggcttgaggaagcgcgccaggaggccgacgatcaagccgataaagatggttccgatgatacccatggcatttccctctgattggtatgagtcatgccaaagcctagtcaggctttggcatcctgcaatcagagagacgcagaaccccaatggttcccgccagggccaggcttattgttcggcgatcagcgcttcaaccttgaggatctgcgcctgcagcgtcgcgcggtccttgcaacgcaggttggcgtggccgaccttgcgcccggccttgaaggccttgccgtagtgatgcacgtggcaatccttgatcgccatcacgcgctccactggcggcacagaaccgatgaagttgagcatggcactctcgccgatcttggccgtggagcccaacggcaagcccgccaccgcccgcaggtggttttcgaactggctgcactcggcgccttcggtggtccagtgcccggagttgtgcacacgcggggcgatttcgttggccttcaggccaccgtcgacttcaaagaactcgaacgccatcacgccgacataatccagttgcttgaggacgcggctggaataatcttcggccagggcctgcagcgggtggtcggtgctggccacggaaagcttgagaatgccgctgtcgtgggtgttgtgcaccaacgggtagaagcgggtttcaccatcacgggcccgcacggcgatcagcgacacttcgccggtgaacggcacaaagccttccagcaggcaggcgacgctgcccagctcggcaaaggtaccgaccacatcggcggcggtgcgcaggactttctggcccttgccgtcgtaacccagggtgcgggttttcaacaccgccggcaggccgatgctggcgactgcggcgtccaggtcggcctgggactggatatcggcgaaggcgggtgtcggaatgcccaggtccttgaacatgctcttttcgaaccagcggtcgcgagcgatgcgcaaggcttcggcgctcgggtacaccggcacgaactgcgacaggaaggccacggtttcagccgggacgctttcgaattcgaaggtcacaaggtcgacttcatcggccagttggcgcaggtggtccgggtcgctgtagtcagcgcgtaggtgttcacccagggccgcagcgcaggcgtccggcgccgggtccaggaaagcgaagttcatccccagcggcgtacccgccaaagccagcatgcggcccagttggccgccaccgattacaccgatcttcatcaataacaacctcaggcgatgcgtgggtctggattgtccagcacgctgtctgtctgctcagcacggaattttttcagcaccgcatgaaactgcgggtgcttggcacccaggatgctggccgacagcaaggctgcgttgatcgcgccggccttgccgatcgccagggttgccaccgggatgccggccggcatctgcacgatggacaacagcgaatccacgcccgagagcatcgacgactgcaccggcacgccaagcacgggcaggtgagtcttggccgcacacatgccaggcaagtgcgccgcgccgccggcaccggcgatgatcacctcgatgccacgggattctgcttcatcggcatactggaacagcaaatccggggtgcggtgggcggagaccaccttcacttcgtacggaatgccgagtttttccagcatatcggcggtgtggctaagggtggaccaatcggacttggagcccatgatcacgccaaccaatgcactcatcgtcgtgcctcttctctctgggcgcccgcaggcgcgtcaaaaaacaacaagccacgcgggagaccggcgtggcttggtgtacgaattaaggccggttggaccggccgaaggccgcgcagtataccgtaataatccagataaacagcccctgggatgaccatctgtctagcggcgcaaagtggcggttttattgacttaagagtcaggcgcgaggtccattcgatgggtcttggcaatggcatcaatcatgaccgacgagacccccacttctgcagcgatcacaggccattgcgccaccgcctcatgcacctcacggatgatctgcatggccttcagccctttgatctggctgcccacactgagcaggtcagccaccacaaaattgtcgcgcttaccgttgatactcatctgatggctgtcgacccagaagtttccaggcatgtaggaccaggtaacgtcataggcaggcgacaaataccaggtaccgtcagtgtccagcaaaaagctgatgttcttggtgtggtcgtcctggtttcgagcgataacgttgaacaccatgcgcctgaaaaactgctccgcctcccggcgccccagtttcagcgccctgaacacgctcagggcctcggcgtaggagtactcacccggttttttgtagtcggcatggtccagtgcgcacaacgtcgcggtgtgaatcttgtcgccgtcatcggtgcggtcgaatcgcttggtcatgaagtgagcacgccccccctcttcaagcagacggcactcagccattaccacaccggcttgcctggccatcaggtggtaggcatattcaatgcgaccaaacccctggctatcggcaagcacgtcggtgttttttgcgacatcgaacttgagcaaccagtagctatagcctttgggcgctggaacctgccctgacctgatatgcccttcgcgattgatggcaatgatcgcctttgcgcgagcgccaccggcacttgtgcccacctggatcaagcgctgcaacgcggcgtcgtccacgctagggtcattggatgtcagccggtcctccaggctttggcgccccgagagcacctccccagccaactgggccaacgccgcgacctcgatggtttcggcctcattggcctcagtgttcatggccggccgatattccagcgcgcccatgccgcgattaccttggtagaggagtcgatccaccggcgtgaacgaaagcttgtcgcgaccctgctgcgccaaccatgcgttgatcaaggcattaccgaagtcatccggaagcgagtcggcaaaaatcgccggaagcgccttataggtttcccggttcaggttggtgaatgcgtaggtgtactcggcgcgggcgggcatgtgaatgggcgagatctcaagccccgtggagacaaactcgggtgaaaactcgaactcgcccacctgggttgtctcgtcccaattgagcgctccgacgtataaaccccataaatagatctgtgcaatcaccaacgggtgtcctttttgactgcgtcgggcacaaggcgctttttctggcccggtatagaggtggtttcggatgagtctttgcgggtggtataggcgcgctgacgttttttcccagccattttcgccatctggatggggcttgaacgcacctcctcgaccagagaactcaaccgatccagttccccgatcacccgcaataccgcaatcagattgagcaaggtgcccttgcccgccatcaactgccgtaacgtcgtgcgggaaatacccgcctcctcggcaaccgtttcctgattgatgttcttcttcaccctcaaggcttcaacgcgcgagccaatcgtttgtgcgatagcttgctcactcatcgtcgtcattcgcattttgtgcagtttcctgatcaaaagatggatttacacaaacctctgatcagtattctagccaatatttatcccggcaagtgatcacgtattgaacaatactttttgagcagaaaaatgatcaaaacatgataaaaaacgatctattgagcagtaaaccactcaatttcattcaagcgagacctcgatctccttgcgctgccccaccttccagcttgcgccacaacaaccgcacattcgccttgcgcaccaacgcgcagcgatacaagcgaatctccagcggcacatgccattgcggcccgccgcacaccaccagttcgccccgtgccaactctgcacgtacgctcaactgcggtacccaggcgatacccaggccttcgagcgccatactcttgaggctgtcggccatggcggtttcgtaaatggtcgtaaagcgcagggcccgctggcgcagcagcaaattcaccgagcggcccaggaacgcgccggcgctgtaggccagcagcggcacactgccctcgccttccaggtcgaacagcggcttgccatcggcatcggcggcacacaccgggagcatttcggtgttacccaggtgcagcgacgggaaaatctcggcgtccatttgcatcgccgcgtccgggtcatagaacgccagcatcaggtcgcaaccgccttcgcgcagggcgtgcacggcgtcgccgacgttggtggccaccagccgcgtggcaatgttcagcccttcgttgcgcaactgcgcgatccagcgtgggaagaaccccaaggccagggagtgggcggccgccacttgcatgacttcgccctgcccgccttccagatgatgcaaatggcgcagcacttcgcccagctgttcgaccaccgtgcgcgccgtcaccagaaacaactgcccggccgctgtcagctccaccggcgtgcgtgaacggttgaccagcgtcagccccaacgcggcttccaggctgcggatacgccgactgaacgccggctgggtgacaaagcgccgctcagccgcctgggaaaaactacgcgtcgccgccagggcgctgaagtcttccaaccacttgctctcaaggttcatcactgcctcccacggaatgcaccattttggcacacacgcccgccaagataaccgggtcacatccacattatgccgtttgtgcataggccagtgtttaacagcattggcccaaaaagttctacaagcctagcattcgcagcgttccggccagtcccgggtccatattgagatgatttccgtcatgtcctctgctgcatctttccgtaccgaaaaagacctgcttggcgtactcgaagtaccggctcaagcgtattacggcatccagaccctgcgagcggtgaataacttccgcctctcgggcgttccgatttcgcattacccgaaattggtggtcggtctggcaatggtcaagcaagcagcggctgacgccaaccgcgagttgggccagctcagcgaagccaagcacgctgccatcagcgaagcctgtgctcgtctgatccgcggcgatttccacgaagagttcgtggtggacatgattcaaggcggcgctggcacttcaaccaacatgaatgccaacgaagtcatcgccaacatcgcgctggaggccatgggtcaccagaagggcgaataccagtacctgcaccccaacaacgacgtgaacatggcgcagtcgaccaacgacgcctacccgaccgcgatccgcctgggtctgctgctgggccatgacgcgctgctggccagcctcgacagcctgatccaggcgttcgccgccaaaggcgccgagttcagccatgtgctgaaaatgggccgcacacaattgcaagacgccgtgccgatgaccctcggccaggaattccgcgcgttcgccaccaccctgggtgaagacctggcccgcctgaaaaccctggcgccagagctgctgaccgaagtgaacctgggcggaaccgcgatcggtaccggcatcaacgccgacccgcgctaccaggccctcgccgtacaacgcctggccaccatcagcggtcagccgctggtaccggcggccgacctgatcgaagccacctccgacatgggcgctttcgtactgttctccggcatgctcaagcgtactgccgtgaagctgtccaagatctgcaacgacctgcgcctgctgtccagcggcccacgcaccggcatcaacgagatcaacctgccggctcgccagccaggcagctcgatcatgcccggcaaggtcaacccggtcatcccggaagcggtcaaccaggtagcgttccaagtcatcggtaacgacctggccctgaccatggcagccgaaggcggccaactgcagttgaacgtgatggagccgctgatcgccttcaagatcttcgactcgatccgcctgctgcaacgcgccatggacatgctgcgcgagcactgcatcgtcggcatcaccgccaacgaagcccgctgccgcgaactggtggaacattccatcggcctggtcaccgcgctgaacccatacatcggctatgaaaacgccacccgcattgcgcgtatcgcgcttgaaagcgggcgcggcgtgctggaactggtgcgtgaagaaggcttgctcgacgacgccatgctcgacgacatcctgcgcccggaaaacatgattgccccacgcttggtcccgctgaaggcctaagcgtttgttgcaccgctcaccaggctgagggactagacacctctcaccttttgagggcttgaagactcgttcttcaggcccttttttttgctcgtaattcctctccttatataaagcgctgttagtgcgtttcacctataaaacatcacgcctgcggcgttacttgaaaaagcattcattcattgcaaattcccattgcgtgcacaaacggtgtgcagtttcgtgccatataaaaacaatggtttcatatatgaaacgctcaataagtaaccttaatctcgcaactaattaatttaaaagggaaatcaacaaaaatttgtaggaattaactcactggcattgttcatgcactaaacggcgtatcacctataaaacagaccagagtaccttcctgatggctgtgaaagagatgtacgccgtgacgccccaatggaatacgcccgcacttaaggaagagctggagccgactgaaattgaattccgtaatgtcggtaaatgtttcccagccaaaggtaaaaccgaagcgccatttgccattcgcgatgtgaacttcaagatccgtcgcggcgaggtcgtgtcgatcatcggtccgtccggctgtggcaagagcaccatcctcaatatgggctctggcctgtatcgccccactgaaggagaagtcttcgtgggcggcgaaccggtgaccgggcccgtgccacaagtcgcgttcatgctgcaaaaagatttgctgatgccgtggcgcagcattcgccgcaatgtcgaactgggcctggagattcaaggcgtgcccagcgcgacccggcagaaggtagccctggacttgctcgaccgttgccacctcaacggcttcgccgatcactacccgttccagctctccggcggtatgcgccaacgcgctgccctggcacgcaccctggccatcgaccctcaggtgttgttcctcgacgagccgttttccgccctcgacgctcagaccaagatgatcctgcagcaggacatggcgcggatgctgttcgatgaaaagaagaccgcgctgttcatcacccacgacctgatcgaggggatcgccatgtctgaccggttgctggtcatgagcgcccgccccggcaccatcatcgaagaaatcagcatcgacctgccgtttcgcgacaacccgctggagcgccgcaagctaccggagatcggcccgctggtcggtcgcctgatggagctgctgcacgtcggcgccgacaccgaactgcactgattgccgcgcttgcggcccccaaccgattcaggagttcccatgctcaagtctctgttccaacgtttctgcgcgctcagccttggcctcggcctgacctgcgcggcccaggcgcagccaaccgacgtcacctacctgctgccggccccacctaacttgccagcctttgcaccgtggatcatcgccaaggaaaaaggctactacgcggcccaggacctgaacctcacgttcattgccgccaaaggtggcgtcgacgtggccaagcagatcggcgccggcaatgccctgctcggcggcgccatcggcgacacgccgatcatggtgcgcggcaacggtattccggtgcgcgccgtggcggtgctgggtgcaggcggtgtgaccatgatcgccacccattccaaggacaacatcaataacgtcagcgacctcaagggcaagaccatgacggtgatgtcgtattccgacaccacctattacgcgctgctcgcttcgttgcgcaaggccggccttggcaagaacgacgtggacatccaggccgctgggcctgccggcgtctggcaactgtttacggccaacaaggcccaggctatggccggcgtgccggactggatggtcaccgccgaagaagccggcgcacagatcaagctgattccccaggagcagatcttcgaaagcatggcccaggccatcctcgcctcggatgacgccatcaaaaaccacccccaggtggtgcgcggtgtggtgcaggccacgctcaaaggcatgcacgacattatccaggacccgcgtgccgccgccgtcacctttgccaaagcggtcccgacctacgccggcaaggaagactcactggagaaaatcttcaagctctatgtcgagcacgtctacgccaaccagcgcgtactggggcacatcgaccccgagcgcctggacaaggtccgccagttctacgtgagcgaaggcatcgtcccccgggaaaccccgctggatgagctgttcaccaaccaattcgtcgacagcccggtcgccgcgcaataacgcaccggacaacaaggtacgcatacgatgaaaaacctgaaccactccgtgctcggtagcgtggcgctgctgatcctgttcctggcgctctggcaatggggccccgggctgctcggcatgcccgaattcgtcatgcccaaactcagccgcgtggcccaggaaagcctggtgatgtggcacagcggcggcctgctgcaacacaccctgatcaccgccatggagatcgtcgtcggcttcgccctgggcgccttgctgggcgtgatgattggtgtgtccctgggcctgtcgcccgcggcggaagcaatgctgtcgccctacatcctggcgttgcagattgcaccgaaggtcgcctttgcgccgctgttcgtgatgtggctgggctacaccatctacccgaaaattctgatcgcaatcctgattgtgtttttcccggtgatgatcaacgtgctctcggcgatccgcacggtcgacccggacatgatcaacctggtgcgcaccatgaacgccagccgctggcagatctttcgcctggtggaatttccctcagccatggccgcgctgttttccggcctgcgcatcgcctccaccctggcggtgatcggcgtcaccgtcggcgagctggtcggcggtaaccagggcctgggcttcctgttggtggacgccgagggccaaggcaacacggccggtgtattcgtcgccatcgtcatgctcaccctgattggggtggtcgcctacggcgccgtggtgtgggcagaaaaacgcgtcctgcactacatgcccaaagccatgttgagcacgcaatgatgaccgaccgtaatcgtttgctcgaaggtcgccgcgtactggtgaccggcggcgcccgtggcctgggttacgggttcgcccaggccatcggccaggccggtgctcgcgtggtgattgccgatgtgctgcaagaccgtgtgcaacaggcggcgtgtgaactgcaagccctggggctggacgtgcaggctgtcactgtcgacctggcccagcctgagtcgatccaggcatgcatcagcgcgacactcgatttgctgggcggcctcgatggcctggtgaacaacgcctccatcaccaactccggtggcaaaggctgcgaagacctgagcatcgacacctgggaccaggtgatgcaggtcaacgtgcgcggcacctggctgatgactaccgcctgcctgccggcactgcgtgccagtggccacggcgccatcgtcaacctggcctccgacacgcccctgtggggcgcgccaaacctgttggcctacgttgccagcaagggcgcaatcatcgccatgacccgcagcctggcccgcgagctgggcgccgacaacatcacggtcaacgccatcgcccctggcctggtgctggtggaagccaccgcctacgtgcccgaggctcgtcaccgtttgtacaacgaccagcgggccatccaacgcccgcaattgcccgaagacgtcagcggcgccgtgctgttcgcgctgtccgaccttgcccgcttcatcactggacaaaccctgccggtcaacggcgggttcgtcatgccttgatctggagactgtcatgactgatctatctgcccaaaacgacaccccgaaaagctgggaccgcccggccggcgccagcctggaaagctggatgaacacccgtatcgcccgttacgaaacgcgcaagtacgactgggatgcgctgaagttccaggccgactacgaccccaagttccgccgcgcacaaatgcgctacatcggcaccggcggcaccggcatctgcaccgacatgaacaccatcccgtcggagcatttcaccttttccaccatggtgatcccggctggccacgaaggcccgccgcacctgcacatcgacgtcgaagaagtgttcttcgtgctacgcggcaagctcaaggtggtgctggaaaaagacggcgagcgcttcgagaccatcctcactgaccgcgacgtgatttccgtgccaccgggcgtgtaccgcgaggagatcaacatcggcgatgaagacgcgttgatgtgcgtgatgctcggcgcgaaaaaacccatcacgccgacctacccgccagagcaccctctggcttcgatcaagcgcggataagcccatgctgccaggactctctcaagccgcgccgacggcggacctgcaagcccaactggagcgtgatttcccccaacgcctggtggcctcggccggtgggcagcaggcattgcgcgaatgtggcgcggggccggtggtggtgttgctgcacggtatcggctccggagcggcatcctggctgcaagtggcgcggcaactggcgccccaggccagggtcatcgcctgggacgctcccggctacggcgattccagcccgctggagtcggatgcgcccaaggccgagcaatacgcagcccgtctggcgcagatgctggatgcactgggtgtggaggaatgtgtgctggtcggccattccctcggcgccctcaccgccctggcattcgcccgtagttcacaggcccatcgcgtcaaccggctggtgctgatcagcccggcgcgcggctatggcgcaccagcccttggccaacagcgccagcaggtgcgtcagcaacgcgtggacaacctgcaacgcctgggcatcgccggcctggctgaacaacgcagcgctcacatgctgtcgccccgtgccacgccccaggccctggcttgggtgcgctggaacatggcgcgcctgaaccccgttggttatcgccaggccattgaattgctgtgcggcgatgacctgctgcgccatggccaaccggccatgccctgcgaggttcattgcggtgaagccgacagcatcacccccgccgaggcctgcctgagcgtggccaaggcgctgggcgccagcttcaacctgattgccgacgccggccacgccagccccatcgagcaaccccaagtggtagccgggcgcctggcctgcgccattcatcaatccctgacaggtagaaccctatgaacgattccgatctgctcaaagacgctcaggacaaatacatcgttccaggcctggagcgcggcctgctcctgctctgtgagttcagccgacgcaaccgcaccctgaccgcgccggagctggcacgccggttggcactgcctcgctcgaccatcttccgtctgctgaccaccctggagaccatgggcttcgtcacccgcagcggcaatgaataccgcctcggcatgtccgtgctgcgcctgggcttcgagtacctggcgtcgctggagctgaccgagcttggccagccgctgctggcgcgcctgtgcgaccgggtcaattacccgagcaacctggtggtgcgtgatggtcgctcgattgtctacgtggccaaggtttcaccgccgtcggtgttctccaacgcggtcaacgtcggcactcgcctgcccgcccacgccactgtgttggggcgcatcctgctcgaagacctgtcgttggccgagttgcgtgagttgtaccccgaagagcacctggaacaacactcgccctgcacaccaaaaaccgtgatggccttgttcgacctggtccaggccgaccgccagcgcggttttgtcagcggcgaaggctttttcgagtcggcgatttccacggtggccgcgccggtgcgtgaccagagcggcggcattgtcgcagccctgggcgtgaccatccctaccgcgcagatcggccacgtcaactttgaagaactcttgaatcaggtccggcgcagcgccgacgagctgtcacgcctgctcaactacaacggcggcgcccacaacgggcagccccgcgtcaccgccttgatgagagactgacatgagcctttaccaattgcagggccgcgtcgccattgtcaccgggggttcttcgggcattggcctggcctgtgtcgaactgctgctggaagccggtgcggcggtggcgttctgcggtcgtgatcaagagcgcctgcgcggtgctgaagccggtttgcgcgagcgcttcccaaaggcccgcctgctggcccaggcctgcgatgtgctcgatgccgagtcggtcaacgcgtttgccgccgccagcctggctgcgctgggagcggccaatgtgctgatcaacaacgccgggcaaggccgggtctcgacctttgccgacaccaccgacagcgcctggaccgaagagctgaacctgaagtttttctcggtgatcaacccggtccgcgcgtttaagcctcagctggaaaaccagcctgacgccgccatcgtctgcgtcaattcgctgctggccagccagcccgaaccgcacatggtcgccacctctgccgcacgcgccgggctcaagaacctggtgcgctcgatggccactgagttcgccccgcagggcatccgcgtcaacggcatcctgatcggcctggtggaatccgggcaatggcgcaggcgtttcgaagcgcgcgaagaacgcgacctcggctgggcgcaatggaccgcacggctggcacaacaaaaacacattcccttggggcgcctgggcctgccgattgaagcggcccgcgcgatcctgtttctggcctcgcctctgtcggcttacaccacaggcagccatatcgatgtatccggaggcctgtcccgccatgcgtaatgaaaacaacactgtcaccgtgggcgctgccatcaccgcctttctcgagcaatgcgacgtcaaggctgtgttcggcgtgatctcgatccacaacatgccgattctcgatgcctttgcagtgcgcggcaatatccgcttcgtcatggcccggggcgaagccggcgccgccaacatggccgacgcctatgcccgcaccaccggcggcctgggtgtgtgcctgacgtccaccggcaccgccgccggcaatgccgcaggcgcgatggtcgaagcccaaactgcaggcaccccgctgctgcacatcaccggccagatcgaaacgccgtacctggaccaggagctggcctacatccacgaagcccgcgaccagttgaacatgctcaaggccgtgtccaaggccgcctttcgcgtacgcagtgtcgagaccgccctgagcaccatgaagctcgcggtgcagaccgccctgaccgcgcccaccgggccggtcagcgtcgaaatccccatcgacatccagtccacctttatcccgatgcccaccgacctgtcgcccctgccgatcccggtggccgtgcccgcgccggatgccctggacctgatggccgaccgcctggccagcgccaagcgaccgatgctctggctcggcggcggcgcccgccatgccggcgtacaggtcaagcgcctgctggcgatgggcatgggcgtgatcacctccacgcaaggtcgcggcgtggtcaatgaagacgacgagcgttgcctgggggctttttcgcagaacaagcgggtcgaacagttcctgcaaacctgcgatgcgctgctgatcgccggctcgcgcctgcgcagtaacgaaaccttcaagtacgcactgaaactgccttcgaatctcttgcgcatcgacgccaacccggcgatcgaagggcgcagttacgccagcgaactgtttgtctgcggcgatgcggcgctggcgctcgagggcctggcggatcgcctggaaggtcgcttgcacaccgacccgagctttctcactgaactcaaagccgtgcgcgaacaatcacgtagccaactgatggccgacctcgggccgtactcggccatggtcgagcaattgcaggccgtgaccgggcgcaacttctcctgggtacgcgacgtgaccctgtccaacagcatctggggcaaccgcctgctgaccctgtatcacccacgcgcgggtgtgcatgccttgggcggcgggattggccaggggttggccatgggcatcggcgcagccgtcgccgcagcggaaacggcgccggagcgcaaagtgttcgcaatcgcaggtgacggcggtttcatcctcaacctgggtgagctggcgactctggtccaggagcgcgccaacctggtgatcctgctgatgaacgaccagcgttacggggtgatccgcaatatccaggacgcggtctacggcagccgccattgctacgtcgacctgcacaccccggactacaccaagctcgccgagtccctgggactgcgccatggcctggtcaccgacctcaaggacttcggcacggtggtggacagcgccctgagccagccaggcccgttcctgctggaagtggacatgctcagcgtcggcaacttcgccacccagtttgccggcccgcccaacagcgaaaccaaagcccagaaggccaccgcctgaggatcgcaccatgttgcatatcaccatgatcggctgcggtgccattggcgtcggtgtgctggagctgctggagaacgacccacagctgtgcgtggattacgtcatcgcgtctgagggctccgaagccttggtgcgccagcgcctggccagtttcaaacagccgccgcaggtgctgacggccttgcccgccgatgcccgcccggatttgctggtggagtgcgccgggcatcgcgccattgaagagcatgtgctgccggcgctggagcgtgggattgcctgcctgattgtgtcggtgggcgcgttgtccgagatcggcctggtggagcgcctggaggcggcggcggaacgcggcaagacccgcatcgaattgctgcctggcgccatcggcggcatcgatgcgctgtcggcggccaaggtcggcgggctggacgcggtcaactacaccggccgcaagccggcccgcgcctggaagaacacccccggcgagcaggcctgtgacctggacaccatcgagcaagccacggtgatcttccagggcagcgcccgcgaagcggcgcggctgtaccccaagaacgccaacgtcgcggccactctgtcgctggccggcctgggcctggaccgcacccatgtcacgttgatcgccgacccccacagcgatgaaaacgtccaccacttcgaagcccggggcgcctttggccgtttcgagttgagtctgcgcggcaagcccttgctggccaacccgaagacctcggcgctgaccgtgtacagcgtggtccgtgccttgggcaaccatgcccacgcgatttccatttaggagccgtcgatgaacaccgaacagacattacccatctgcatcgccggccagtggcgcccaggccgtggcgagcgttatgccagccgctacccggccaccggcgaagccgtggcctggctcaatgccgccgacctgcaggatgtggaagaagccattcagggcgcgcaccaggcgtttttgcacagcggctgggcccagcgcaaaccccacgagcgggccggcgtgttgtatcgcatcgccgagttgatccgcctgcacagcgaagagctagcgcaactgcagcgccaggacaacggtaaaccgatcaatgaaacccgcgccctggtagccagtgcggccggcacctttcagttcttcgccgcggcctgcgaaaccctggaagaaaccatcaccccgtcacgcggtgatttcatcagcatgagcgtgtatgaaccgatgggcgtggtcgccgcgatcactccgtggaactcgccgattgccagcgaggcgcagaaggtcgctccggcattggcggcgggcaatgcggtggtgatcaaaccggcggaaatcaccccgctgctggccctgcgcctggcgcgtctgtgtgaagaggccggcttgcccaagggattgatcagcgtgctgccgggcaagggttcgttgctgggggatgcgctcacccgccacccgctgatcaagcgcgtgtcgtttaccggtggtacgcgcacgggcaagcacatcgcccatatcgccgccgacaagatgatgccggtgtccctggagctgggcggcaaatcaccgaccatcgtcctcgaggacgccgaccttgagcatgcggtggccggggtgctgtacggcatcttcagttcgtcgggcgaagcctgcatcgccggctcccggttgttcatcgcccgcgccttgtacgagccgttcatgcagcgcctggtcgctgccgccgcgaacctgcgggtgggcgacccggccgacgagcatacacagatgggcccgttgatcagcgccagccaccgcgaatcggtggagcgttacgtcgccctcggcctggccgaaggtgggcgcctgcgcctgggtgggcagcgccccagcggtaatgtgtatgaccagggttacttctatccgccgaccatcctggagggcctgagcaaccaccagcaagtgtgccaggaggaaatcttcgggccggtattggtcgccatgccgttcgacgacgaagcacaactgctggagcaggccaacgacagcgtctacgccctcgccgccggcatctggacccgtgactacaagcgcgcctgggccctgggccggcgtttgcaggccggtacggtatggatcaacacctacaagcagttctcgatctccacgcctttcggcggctggcgcgacagcggcctgggccgcgaaaaaggtcgcctgggcatcctgcagtacatggaacagaagagcctctactggggcatgaacgaacagccactggcctgggccggtgtgccacgagaggtagcgcaatgagcgttttaggtattgatgaagtcacttacggcgtcgaggacctggacacctgcgtacgttttttcagcgactggggcctgacccaagtcagcgcgcaatcggacgaggtggtgttcgagaccctcaacggctgtcgcgtagtgcttgcggacctgaacaagccgggcctgccgccggccatcgaagccggctccacggtgcgcgaagtggtatggggcgtagccagcaccgccgacctggcgctgtacagccaacgcatcgccaatgacccggggtttgtcgaatgtgacgggcgcatcggctgcaccgaccccaacggtctggcgatccgcctgcaagtcacgcgcaagcgtgaactggagattgaatgcagcggccacaacacctggcagaccaagggccggatcaacaaggcggcgccgatctatgagcgcgccacgccgattgaagtcggccacgtggtgtttttcgtcaaggacgtgaacgcctgcgaagccttctaccacgagcgtttcggcttccaggcctcggaccgttacccggaccgcggcgccttcctgcgcaccgccgaagaaggcggccaccacgacctgttcatgttgcaactgccggcaccacgggcggggctgaaccacgtggcctttaccgtgcgcgacgttcatgaggtgtttggcggcggcatgcatgtgtcccgcagcggctggccgaccgaaatcgggccgggccgccacccggtgtcttcggcgtttttctggtacttcaagaacccggccggcgcgctggtggagtactacgccgatgaagaccaactgaccggcgaatggcagccacgcacctttgagcccggccctacggtcttcgctgaatgggccattgctggcggtatcgacggcaacacccggcgccagcaacacgtcgaagcgccgcaaggcaagttcctcaccgacaaacccaaaccttgagcaggagtcgcccatgccttccctgaatattgctatcgccggtgccggtatcggcggcctgaccgccgccatcgccctgcatcgcgccggtcaccaggtcaccgtgttcgaacagtccaaggcctttttgcgcgtcggtgccgatatcaacctcacccccaacgcggtccgtgcgctggatggcctgggcattggccccgccgtacgcatcccggccgctcgccccacgcaccgcatcagccgcatgtgggacaccggcgaggaaacctcgcgcctggaaatgtccgatgctgccgaacaaaaatacggcgcgccgcaactgaccatccaccgcgccgacctgctcgcggccctggccgaagtgttcccgctgaacaacgtgcagttcgccaagcgtgccgaacggatagaacaggctgacgacggcattaccttgcacttcaaggatggcagccagcaccgctgtgacgtgctgattggcgcagacggtatccactcagtggtgcgaagcgcgctgtttggcgaagagcatccgcgctttaccggagtggtggcctatcgcgcggtggtaccggccgaacaggtggcgcatgtgccgaacatccaggcgttcaccaaatggtgggggccgaacccgcaaagccagatcgtcaccttcccgctgaaccagggcaaagacatcttcatcttcgccaccaccgcccaggacagctggcacgaagagtcgtggaccagcgccggcgatgccgatgagctgcgcagccactaccaggcgttccatccggacgcccgcgccctgcttgatgcctgcaccgatgtgctcaagaccgcgttgtatgagcgtgacccgctgccgttctggtccaagggcgcgatcaccctgctgggcgatgcctgccacccgatgatgccgttcatggcccagggcgccggccaggccatcgaagatgcggtggtgctcgcccgctacctgcaagacctcgacagccaggcctcggtggccggcgcgttgcaggcttaccagcaagcgcgcctggaacgcaccagccagatccagatcggctcgcggggcaaccagtggctcaaggacggcggtaatgccgattgggtctacggctacgacgcctggggcgtcccaacaactcacgcagcctgaacacacctgtacggaggtcaacaccatgagtactcacgaaccctacctgcaaccccatcaggcacgtaaacgacccaacacccagttcgaagagttgctgggcgactccatcgagcgcgcgtttggcagtggcgtgaccgaactgccggccctgctcgcgcatttgaacctggccggcccgccgtgcccgctgaccagcggcgagtggaccgaagatgcctacaaaaccctgatggcccggctgggcgaatgacccggcagaaggaataaaaatgaacatgcaattgaccgtcgaccctgttgaacagcatctggccaatggcctcaaagacctctggttcccggtattgccgtcggaccttttgggtgagaagccgctgtcgatacgacgcctgggctacaagatcgccctgtggcgcgacaacgatggcagcgttcatgcgctggaagaccattgcccccatcgcggcgccccgctgtcccaagggccggtgctgggcgatcgcctgcagtgcccgtaccacggcgttgaagtgcgctgcgacggcaccgtcaccaaagtacccggcagccccggctgcaaactggaaggcagccggcccacgcgtatgttccacacccgcgaagccgcaggcgcgatcttcttgttcaacgccaccgacccgcacctggacgttgcgccggagctggtgctgcccgaacaattgacctctcccgagtggagcagcttcgtctgctacaccgagtggaaaggcgactatcgctacgtgatcgacaacgtcatggacccgatgcacggcacctacctgcacaagatgtcgcactcgatgagcgaaggcgaagccaccgccaagtttgtcacccgcgacaccgacaccggttttttcttcgagaaggaaggccagcgcggcgtgaacttcgactggaccgagttcgtggacaacggctgccattggctgcgcctggaaatcccctacccgaaaaccggcggccccggcggcaacttcaccatcatcggcagctacacccccagcagtcgttcgctggccgccgcatttcactggcgctgccgcccactgaccggctggcagcgtgacacctggcgcttcttgtacaaaaaccgtctggaagcgcggcattgggcggtgcttgaacaagaccgggtgctgctggaattcatggagccggatgccaatcagcgtgaaaacctctaccagcacgacctgggcgtagtgcggctgcggcggtacctgaagaacgccgccaaagcccagctcgagttgatcgacgcgaagcaattgccatgaacaaagccgcgctcctcaacgcccgcgtccacaccctgcgctatgaggccgaaggcatcatcagcgtcgaactgcggcctttgggcgataccgtgttcccaccgttcgacgccggctcgcacatcgacctgcacctggccaacggcctggtgcgcagttattcgctgctcaattcgcccagcgaccgtgggcgttatgtggtcggtatcctgcgtgaccgcaacagccgtggcggttcggagtatgtgcacagccaattgcgggtcggcatgccgttgtcgatctcgccgcctcgcaacaacttcgaactggacctgagcgccagccacagtgtgctggtggccggaggcatcgggatcacgccgatctactgcatgttccgccaattgctggcgctgggaaaatccgccgagctgatctactgcgcccgctcacgccaggaagctgcattggtagaagaattgggcggactcggtgcgcgggtgatttaccacttcaatgacgaaaaaggcgtgccgcccgatctggccgcctacctcgccggccaacctgcggatacccatctgtactgctgcggcccgacgccgatgctcgacgctttcgaaagtacctgtgagcgcctgggttatccccatgctcacatcgaacgctttgccgccgccgaactgccgcccagcgaagacgcccagagcagttatagcgttgaactgaaaaggtccggcaaaaccctggcggtggaacctggcttgagtttgctggatgtgctgctggaggcgggttgcgacattgatcacagctgccgcgaaggcgtgtgtggctcctgcgagacgcgggtggtggggggcgaaatcgaccaccgcgatggggtgctgaccaaggccgagcgggctgcgaacaagtcgatgatggtgtgcgtttcaggctgcaagagccgacggttggtgctcgacctctaaccccccttgtaggagcgagcttgctcgcgaagaacgtccaggcaccgcgttactccaaggtgctcgcagtatcgttaacgtttttcgcgagcaagctcgctcctacaggatcacccgcaaagtgcccgtttcattggcagcgtgcaataaatacgcacctatcatgggcaactttgttaccgcacttgcgggttgtttcgtgggttatacaaacagcttgtttcccatataaacaactgtttttaatgatgttttcttaaagcacaaactaataatccgcctggcacacttcctgctctactcctgtgcattcactgattaaacggcgtttcgccgataaaacaataagaaccaacacttaaacccggtaagacccgctccctccttagttgcctttaaaggcaagcggacgagtgttgccgatcacccggtagagaggtctctatgaagcgcgtcttgtgtgcaggattgatgtttgccagtttcagcagtttcgccgcagaacccattccttccgagccggtacgggccaacgccgccaacaaacctttcccgcatatttcctggcgcagcgatagcggcgacagcagcctggacatcggcggggcgttgcgtaccaactatcgcgacgagcattgggacaccaccgaaaacaacggcaggtttctgttcgacacgttccgtctggatgtgcaggccacctacaagagactctacagcgatatcggctactggttccaggatgacggcaagcgttccattgaccgcgggttcgtgggctatcggctcaatcccaactccaacctgcaactgggggcgccgttcaaacccttcggtctggagccttatccgcaatttggctggagctaccacctgccgttcttcatgggctacgcggtgagtgccggcaccggcctcaaatacagctacaaggatcaggattgggacgtgcaactcggctacttcccgcgcatgctgcccagcgatttgcgttactcgccggaagtggggcgttacgccgacttgaatgacaacgcgattgccttcacccagtcgcgccaggacaacgagaagcgcaaccaattcaacgcccgcgtggcgcgcacgttcaacaacgagggctggaagaccgaagtcggtgcctcactcgccaccgcccaactgtacaacgcaaccaccaaagacaatggcgactactgggccgccggcgtgcacgccatcatcagcaagggcctgtggaccgtcaccacccaagccatccgctacgaatacgaccccgaaaacccggccggggtgagcaacgactcagtgctgatgggcggcaatggcctgacgcctgcgtacctgatcgcctccaaggccagcctggcttcgctcaacgtcggctacgacatccacacgccccggctggggcaactgaagaagatcaagctgtacagcgattacagccggatgatgaaagacaaaagcgcctgggacgactcgcagatgttcaccgtgggcgcgcagttcctggcgatgccggtgatggcctgggtcgacttcacctgggcgcgcaatgccaacccctacggcggggcggagaatggcagcggctttaccagcaccaattcggtgggtagcaacgactggtattaccgcaccaacgtcaacatcggctactacttctgacatccccccctgtgggagcgggctggcagttcgctttttgctgatatcgggccttgggtgaggcccgtttgggttacctgaacttcagcgcaatggctacaacagccatccaaatcaaggcggtaaagatcatcgtcgtaacgattgtgagacggcgttttagatagggtgggaagttttcaaagtctacagggtccaagtcgcctaagcggatataggactttggcaacaagaccatcccagcgatttttgaaatatccaaaagagaccaaatcaaccctcgcttcccgaggctgtctccccaaaggtagatataacggctgtttttcaaagcttcctttatggcgtccaagtgacggtgggtgaggtacagactgaatgcgaggccagcaactccgataagggtaggtgcaccaataacgatgatcacaatccaaggattccacgtatcgatattggtcatcgttgaatcacttcataaattttttccccgatgacttcccccgcagctccaccgcccgtcgtacctatccatgcgccagtccctacaacggcggcgacgcaaacaactccccctattccagtagaggcaccaagtgccaagcagatcggaccactggcaagtccgctcccccatccggctaaagcaccgaaagcggtggacaagccgaactttcccgattccgtgaacttgaccttctcacacgtctccccagagtcacccttacacacctgctcaatagccagcaacgaagacaccccgccaaggcctataccgatataaccaccggccttcatatacttcgtggcacggctgaccgcctccacatgagcgacataccccggaatctgccccggtccatcagccttacccctagtgatataccagatgccggcagggcatactgaatgccggcccccagcactcagtagccataccaagttacttaagcgcctgtaacatagatataattgctagccaaacgacaccactcaccaacattaaaaaatcaatcttcaatagaaacttcagataaggaggaaagttttttatatcgtcagagtctagatctcctagctgaatatacgccctcggcatcattatcatccctgtgatttttgctatttccaagagagaccaaaccaagcctcgttttcctagactcggcccccaaagataaacatagcgactattcttcaaagcatgctttatggagctcaagtgacgatggctgagataaagactgtatacaatactggcaattcccagcaggaacgggccagccacaagccagatacctacccaagagttccaaaaatcctccgatatcatggcaaggttttctcatacaacttctctcctaactcttcgcccttcatacctccgacagtcgttcccagccaggcgccagctcccacgacagccgcgacgcagacaacaccaccgataccagtagaggcgccaagcgccaagcagatggggccactcgctgattgggcgatttttccagtcatataaccaccgatagtagacccaccaaatttcccaacttcagtaaacttaatcttctcacaagccgtaatcgaatcgccggtacatatctgttgaatagccaaaaccgacgaaacaccgccaataccaatcccgatgtagccgcccgtcttcatgtatttggcggcccgactcgtcgcctccacatgagccgcataccccggaatctgacccggcccacccgccttgtcccagtgatgtaccaagctgcgactggatatacccagggccgttttcaacttggggtgatcgcccaaggttgtctggccgcgcaggcgcgtggagttgagcagatgagcatccaactgattcatcaaccgctggcgatcagcaaagaactgcggtgacctaaggtgtccgtgctgccgatagctgtcctgatgcaggcgctccatggcctgcagggtttcgcgcagattgctcaggtgcttttccatcaccaccgcactgacacctaaccaggttgaggtgtggccgatgaaaccggcgatttcagcaccatggcgatacagaaagtcggcctcgtccggcgtcagctcatccagagatgcgctgacgtgttgagccgcctgcatcagttgcgcttcctgataggtgcaggaggtgttgttcggatcgctgagcacgatcatcgagccggctttgacgttgccggtattgggattcagtgcctgaaacttgcgcattacagccgggtcgagcgtcggaaaaagtgtggcttccagcgcctcgcgggtcatgctctggggcacgatatagaagcctggctcctggccgtgcgcaccgttgaatggcgttggcactgtatgagcggatggcacgaaaccagattgatgcggtgctgcagggctaccgtttacagctgatgcactcgatggagcaactctctggcccatgggtgatggggcgctctggtttacgtaggtggccgagtacaccgagggaaccaggcgagctcgacaggggcaactgctgaagctgtccagcgtgccagcgacacgttttccatgactttgaatatgggaaatgccgcctagaatctggtaagtccctgcatgtttcccgcacgtcactcggtcgccttcgcgcgcatggagaacaccgtgcatatttaccctggcgtcaccgtcgagaatcttaccgccgcatgtagttttgtcacctagaccaacaaagtgcccttcactcattgtttttaccctttatccatatggtgttttggccgtgctttcctccccgcctcgatacgcgtgacgcatttcaatcgaggtaaacgagtaagggaaagtcagcggcaagccaaactttggagagggatttacttagggtaaagtcggacgattccgtgagttttgtcgtataaatctgatgggttgcggcgcccgatgccgggcaccgggcgcgtattactcgttgccaccaacgtttccaggcacagtcgtcaaatggctgttgtggcgagggagcaagcttgcgctgggacgcgaagcggccccggaaaatgggactgctgcgcagtccaacgggagcgagctccctcgccacaggtaagctatttatcggccccggcgcgatttttccaattgaccgttcctcggtcaattacgccccttgcagacggctggcgcgcacctaggtatagtgccgcccctcttcgcgtctgcggccgtcgataacgaggcccgggtacaccgcgaaagcgcatgaataacaacacccgcaaaaggatggggatcgagcgtcgtgcactgcctggtgccgagcgatgcgtcggaccgtcctgcgtttgccatcagaaaaatcagcgaggaacactccatgctcgaagtcatcaacgacttcctctcagggaaagtactgatcgtgctcatagtcgggctcggcggttatttcacgatccgctcgcgtttcgtgcaattgcgtcactttttccacatgttctcggtgtttaaagacagcctcaagagcagcgccggccaactcagctcgttccaggcgctgatgctcagcttggcgggccgcgtgggtgccggtaacatcgccggtgtcggcattgccgtgacgttgggtggcccgggtgccgtgttctggatgtgggttaccgcgctggtgggcatgtcttcgagctttatcgagtgctccctcggccagttgtacaagcgcaccgacgctgaaggcacctaccgtggcggcccggcctattacatccagcacggcctgcacaagcgctggctgggtatggtcatggcgttcctgctgctggtgaccttcggctttgccttcaacggcctgcaagcccacgctgtaacgcactcgctgaacaacgccttcggcctcgacaccacctacaccggccttgcgctggcggtgttgctgggcctggtgttcatcggcgggatcaagcgtatcgcctcgattgccgacctgctggtgccggtcaagaccctggtctacatcgccgtgaccctgtacgtgatcgtgctgcaattcgaccatgtaccggccatgctcgcgaccatcgtcaagagcgcgttcggcctcgaccaagccttcggtggcctggtgggcagtgcgatcatcatgggtgtgaagcgcggcgtgttcgccaacgaagcaggcttgggcagtgcgcctaacgtggcggcagtggcgtcggtagaacacccgatcgcccaaggcgtggtgcaggcgttcagcgtgttcctcgacaccttcgtgatctgcacctgtactgcgttgctgattttgctgtccggtttctacaccccaggctttgaaggtgacggcattgccctgacccagaactccctggcggcggtagtcggtgactggggccgtatgttcatctcggtggccctggcgttgttcgtgttcacctcgatcatgtacaactactacttgggcgagagcaacctgcgcttcctggtcggtaacaaccgcaaggtgctgatgggttatcgcgccttggtgctggtgctgattttctggggctcgatcgagaacctgagcacggtattcgccttcgccgacatcaccatgaccatgctcgcgttcgtcaacctgttcgccctggcgttcctgttcaagattgccatgcgcatcctcaatgactacgacaaccagcgcgcggcgggcatcaagactccggtgttcgattccagccagttccccgacctggacctggaccgcaaggcatggccggccaacccggtgaaaaccgaaacggccccggcagcggaactgagcgctcaagcgcaacgttaatcgcagctagatgacacgccgcccggccttgggcatgctctgggcccggcggcgtttttcgttcaggagattttcgatgcaatcagctaataacgtgatggtgctctataccggcggcaccattggcatgcaggccagcgccaacggcctggcgcccgcgtctggttttgaagtgcgcatgcgtgaacagtttgccggcgcagacctgcccgcgtggcgcttccaggaaatgtcgccactgatcgacagcgccaacatgaaccctgcctactggcaacgcctgcgcagcgccgtggtcgaggcggtagatgccggctgcgacgccgtgctgatcctgcacggcaccgacaccctggcctacagcgcggcggccatgagcttccaactgctgggcctgccggcgccggtggtgttcaccggttcgatgctgccagcgggtgtaccggatagcgatgcctgggagaacgtcagcggtgcgttgacggccttgggcgaaggcctgaagccgggtgtgcacctgtacttccacggcgcgctgatggcgccgactcgctgcgcgaagattcgcagttttgggcgcaacccgtttgccgcactgcaacgcaatggcggtgttgcgctggcagacaagcttcccgccgcgctggcctaccgcaacgacaaggccccggccaacgttggtgtcctgccgctggttcctggcattgctgccgcgcaactggatgcattgatcgacagcggcatccaggcattggtactcgaatgcttcggcagcggcaccgggccaagtgacaatccggccttcctcgccagcctgaaacgtgcgcaggatcaagaggtggtagtggttgcaatcacccaatgccatgaaggcggcgtggaactggatgtctacgaagccggcagccgcctgcgcagcgtgggtgtactgtccggcggcggcatgacccgagaagcggccttcggcaagctcaacgccttgatcggcgcggggctggacagcgcagaaatccgtcgcctggtggaattggacctgtgcggcgagctgagctgaccggcatgtaacttgctccacttccagctatcccctggctggaagttcccatgctgcattcccacctcaccaccctcaatgccgtttccctagtgctgcgtaccttcgaggtcgaaggcttgccccctgaagcattgctggccggcagcggcatctgtgcggcggatttgagccgcgccgacacgcgtatcgccacacatcaggagatgcaagtgtgtgccaatgccgtggcccatcagcgtgatatcggcctgatcgttggacggcgtatgcatgtttcctcgtacggcctactgggctatgccctgctcaccagtgccactttcggtgacgctttgcgcctggccctgcggtatccggcgctgttgggaacactcttcgaactgagcctggaagaggacggcgagcgtatctggttcacggccggcgattaccgcgaaaacccggcactgactgccttcaatgtcgagctgtgcctgggatcactgaaggtcatttgcgacgacctgctcggccatccactgccgttgctgggcgctcggttcgagcacgatgcgccggattatcaggcccgctacgccgagagcttcgactgcccgctgcagtttcaggctatcgccaacgcgttcgcctttgataaacgctggctcgcccaacctttgcccctggccgacgcggtcacccaccaggccatggtcgaacgttgccgcaaacagaacaccgaattcaccgggcgcgaggcctggctggggcgaatccgccagctgctggctgcacaattgcacgccgcacctgggctcgatggcctggctcagcagatgaactgttctgcgcgcaccctgcgccggcacctgcacaacctgggttgcagctatcaggaactgctcgatgagctgcgtttcgaacgcgccaaacagttgttggctaacggcctgtggccgatccaccggattgccgagacgctggggttcagcgaaacggcaagcttcaggcatgcgttcgtgcgctggagcggcgtcacgccgagccaatttcgtgcatgacgcgccaatgaggggcgaattgcggacacacactttggccatattgatccccttttggccgctcctgtcgttctcataaaccgcgtgcgccgcaagactgcactcacgaatacagcctgcggagaacaacaacatgctgacgatctactcggacgatcaccacctgcaccatggccgctgtgagctgatggacgggcaactgatgccctgcttcgaaatgccctcgcgcgccgaccatgtgctgcaacgggtcaaggaccgcgaactgggcccggtgcaggccccggaggatttcggcctggcaccgctgcaacgtatccacagccgcgactacctcgacttcttcaaaggcgcctggcaacgctggaccgaatacggccaggacggcgacctgctgccttacacctggcctgcgcgcacgttgcgccgcgtgttgcccaccagcctgcacggccagttgggctattacagcttcgacggtggcgcgccgatcaccgccggcacctggcaagcggcttacagcgcagcacaagttgccctcaccgcccaggccgctatcgcccatggcgcccatagtgccttcgcgctgtgccgcccgccggggcatcacgccgccagcgatttgatgggcggttattgctacctcaacaacgcggccatcgcggcccaggcgttccttgatcagggctgcaaaaaggtcgcgatcctcgacgtggattaccaccatggcaacggcacgcagtcgattttctatgagcgcagcgacgtgctgttcacctcgattcacggccatccggaggcagagtttccgttctttctcggttatgccgatgagcacggcgaaggcgaaggcgcgggtttcaatttcaactatccgttgccggcgggctccggctggcaggcctggagcgcggcgctggaacaggcctgcgccgagatcgagggctacgctgccgacatcatcgtggtgtccctgggcgtggacacgttcaaggacgaccctatctcgcagttcaagctcgacagccccgactacctagccatgggcgcacgcattgcgcgcctgggcaaacccacgctgttcgtgatggaaggcggctacgcggtggaagaaatcggcatcaacgccgtcaacgtgctggaaggtttcgaggaagcagcccaatgaacatactcaagtcgctcgccctgtgcgccgtggttgtcagcggcgcagcccaggccgaagaaaaaaccctgaaggtctacaactggttcgactacatcacgcccaaggcgctggaagacttcaaggcccagcacccgtcgatcaagctggtgtacgacatctttgacaccaacgaagccctggaagccaaactgctcaccggcaactccggctatgacgtggtggtaccgtccaacgtgttcctggccaaacagatcgaagccggcgtgttccagcccctggaccgcagccaactgcccaactggaaccacctcgatcccaagctgatgaagctgatcgaggccaacgaccccggcaatcaatacgccgtgccctacatgtacggcaccatcctgatcggcttcaaccccgccaaggtcaaggcggccctgggcgacaacgcccccgtggacagctgggacctgatcttcaaggaagagaacatcagcaagctcaagcaatgcggcgtcgcactgctggactcgccctcggagatcctgcccctggccttgcagcacctgggcctggaccccaacagcagcaaccccaaggactacgacaaggccgaagccctgttgatgaagatccgcccgtacatcacctactttcactcctccaaatacatggccgacatcgccaacggcgatatctgcgtggcggtgggctactccggcagtttttcccaagccgccaaccgtgccaaggaagccaagaatggcgtgaccgtggacatgcgcctgcccaaggaaggcgcgccgatctggttcgacatgctcgccatccccaagggcgccagcaacccgggcgacgcctactcctttatcaactacctgctgcaacccaacgtgatcgcgccgatcagcgactttgtcggttaccccaaccccaacaaggatgccagcgggttggtcgaaccagccattcgtaacaaccccaacctgtacccgaccgacgcagccatggccacgctctataccctcaaacccctggacagcaaagccgaacgcgccaggacgcgggcctggaccaagatcaaatccggcaggtaacgccctgcagattttacagtaggcctacgtaagcaccgcctccccggctggccgagccctagcatggaaaacccgagcctggacctcgggttatttccatcaatcggccagacagggaagcctcatgacctcagccgctgcaaacacgccctctacgaacgcaaagcgcctggatgaacgttcagcgctgttcaccgaactctacgtcggtccctcattcagggagaccgcgtcccacttgttgcgccagtcgctgcgagaacactacccaacgctggatattgacccggacatcgccatggtcggtacacccacctggcaattgatcgacaatgagatcgtcgccggccccacgcattatcagtcgctcagtgaaatcctcgcgatacaggccgtcgtggccgagcccgccctgtacatcgagggcgagcactttctcacccagcaaccgatcgtcgaaccagcggtgcacctgcccgtgcgcatctgtgaaatagccaagaccctcaacgtgctggccccggtcatgctgcgggccttccagcaacagctggtcgattattggaaccagaccaacggcaacggcgctcactggcagcgactgtcgagcgtattgcgagcgatctggaacgttgagaccgccgatgactggagcgccaccgaatgcgccatggcgcgcaccctgttcacgtcccccgataaagccgaccgcaagggtaaagacccctataacctcaaggcctgcctgattgaaatcgaccgaatcgacgcagaacaagtgacacaccgcaatgaggtggtgatcgcggtactgctcggcgaacatgaagggcaaacctcgatcctcatgcattcgctgctcaagggttatgaaaaattcccttcgctggagcaactgggccattcgctgcctgagcatttgccgggctctaccgcaaagcaggaaatccattggcgcctgtacgaacccgagggcaatttttttgatcagcaagcttgcgcgttggtgtctgtgctggtggaggccgtgggtgacattgatttttcagacgtgcatcacacccacgccgctgatgtcgcagtgggcacgccgcccgccgtcgtcccccttgcgacggataaaagccccgaccttgcgtggtatcagagccaattgcccgattggttgatgaatgcctccaacgcagaccaggatttcttcgctcgccacttgaaggacctcgctgcgctgcacagccagaacgacggccgctcctacctggacgatatcccttccatcgaagcgtacgcgttgaagatggccaaagcgcaaatgctcaaggatcatcctgacagcgccaacgttcccttggataaaatccggctggaggtaaaaagcccggtcatctggggcgccttcgtggtgccgggtcagttcgacaccagcaccttcagcgtggccgagttggccctgcagaatctgattgcgctgccgaccggtaatcgctctctcaagaccgaaaatggcttcaacctgcccgaatggttggacgcggattatgttgtatcactggtcaccgctgtcgatatcggcagcacctatcccgccctggtcaaagagaaactgctggatgacccgcaggaatcctcgcgccgtaaaacgctcttcaaacagcacctgcgtatccagctgccgatgcaggccttgcaagccaagattcgccagcaggaaggtatcgacgagcgtggctaccgttacgtggccgccgtcttacaggacgaccccactgaccgtctagtggacggacaaacccttgtgctcaggccattggcttttcggccattacggcgcacgtcggcttctttggacacggtggctaacatgtatgtgatcggccccgacgacccggcggcgggaccctgcctgctgtatcggccgatgttcacgccggcactgatgcagttcccgtcaccggccaatctgatctatgcgatctcgcagtcgagcagcctgcgcgagtcggtgctggcctggctaccggaagccgtgcgcagcgactatgccaattatgtatttcccggcacgctgccatccccctggcaggtagccgatgccctgatagagcccgataagctgtggaccatgagcgggcccatgacgctgggtgagcaggtactcaacggcgatcggttctacgcgctgttcaaagccaacgctgatgccttgatcgaactggccgatcggcaatcggtctccaacgccgaaaaccgctgggccaccttcaagcgcgccggttggctgatcttcaatctcgtgctgccttttctcggtcgtagcgtaggcacggcggcgtggatctggcaggtggtcgatcaactgcagaactttatcgaggctcaggaacacggtgaaaagcaggccgagtggtcggcgctcaccgatgtgctcctcaatctgggcatggcaatcaccttgcacgtcgccagccgcagccaccgccccggttacccacgcaagtccaggccagcattgccgaaggcgacaaccgccaaagacgtcacggtcaaacaacagccgtcggcatctcatgagctgcccgcacctcatttgcacatcgatggcgcaatcaagcgcgccccaggtgaactcgtcaaactgctcgacagcttcaaggtcagtaaaccgcaaaacctgggcaccgttgaaactgccgaaggccagtaccagtacctgtaccgccaggcgcagcactactacgcccccgtgggggagcgctggttcgaggtgagcgtcggcgaggatgagccggtggtcatcatcgatcccaagaagcctgaacgcacaggcccggcattgatccacaacgccaggggccaatggttcatcgacacacgcttgcgcctgcgcggcggcggccccaagaaacagcagcaaaagtcgcagaccgacgcgcaggccgaggccgataaggcccaacagcgcttgtcacaattcgagcaagacaagacggccacgcaagagcagctgcaacaggcgcgagtggccatggacgatcctcaggccagcacgtcggcccaggcccgccgtcacacctacctgcagaaactcgaaacccagagaaacagctacgaatcggcgctgcaacaactcaagatcttgaacgtcttcgcgccgaccgcaacctatcaggagcaagccgttagctatgtagacgccgagctgaagctgagcgaaaccgggatacgcgaggctcaagtcacctttacgcccaagctcgaagccgtgctggaccagatcaagcatcagatcagccacccgcaggatcgtcagattgacgatgcccgggccctgaccgatatgagccaggacatgatcgagcgcctcaattacatcgaatcgcgctttaatcaactcagggcaatgggcaagaaaggcttcgaagccattcgcgagcaccgcaagcacttgccggcctacaccgcccaatacctcagggccctgcaggtaacgatggcgcgtaacctgtgcgtggacgagagcagcaccaccgcactggatgcgtggaatgccctcgaccgtattgtcgacagcgccgacctgaccatcctgagttttcgtgaaagtctgctggagcgcagcgagtcgcggctggacgaacgcatcgaaatcctcgccagcctggtggagcaattcaacatcattgatgaacgcctgcaggattttgcccaggagttcaacgacgtcgcgctgaccagcccgctcacacgcctgcgtgaaaaagtccgtggtttctacaacgaaaccgtgggtcacctggagttgctgcacaatgcccgcgaagcactcagaagccgacccacaccgccacccacccctccaaaaaccaggaaaaaaatcatctatacgcgctacaacggcgttctgattggggagccccgccgctcagccctaggcgaggaaaccggactggtggatatcagatcaccgctcaacgacgagatcatcgcgacctttcacgaaaaacccgcaggcatctgggtgcagcgcgagagccccgtcgaagcatcgtccccccctacccttgatgtcgccacctgcgtcaatcaggcacaagatctgttagaccagttacaagccttcaagcaacgtgccgccgagcaagcggccaagccggaacgcagcgccatcggcatcgaatggctgtatcaccagcacgcgctgaaattggagcaggcctcggccaacattgaacaggccttgaccgaaggcaatatcaccgacagccgcctaggctcagcggcggttgtcaacaaacaactcagcgaagcagtgcaagccctttacagcgaggcgcgaagctacaagtcgctgttaatcaaaaagcacccacccactgtgcaaggtgtggaatggctgatgcaaaacaacgagatcgtcatcaagaaaaccgtcaagcgccgccgaatcaaaggccctgacaaggactatctggacgagtacaccatcagtaaccgcaacgaccgaagcgtgctgtggtatgcccatttccattactccaccgactgggtgcccgccaaggcgtttttgcgcgcacgcctcaaaacgccacaagagcacgggcggggcgaagaagccgataccctcaacggccttagcgagaagcagaaaaccgcgatctatctcagcgaaatcaatctggaccaggcacgacggttgtttttcaacgtgaaataaatcacccacctgtggcgagggtgcttgtcccacactgaacggctgcgcctcgacgtatctaccgccctcgtcacaccggcgctcgctaacttgccgactcctgatgcccgtccgggccatcgaatgcagaggagcggcacatgcccaatgacatcgctaacaaccaccgcccacccagtacctatgaagtgctcacccaattgaccaccggcccctccacccgggaagtcgccgccgccacactgcgctcggcactcaaggagctgtaccccacgctcaacatcgatcccgacctggccgtggtggtcagccctcaatggcaggtggtcgaaaacgccatagagcgcgcgccgccctttgtcgagtcactcacttcggtgttggcacatcaggcactgtccgacgagagagtgacctacatcgacggccaacacttcctcacgttgcaaccgaacgctgcggtgcctgtgcatctggcggtaaaaatcgatgacatcgcccgcctgatcaacgaattgtccgacctgctgttcaccgccgcacaggaacagcagttggacttctggaacgcctccaacgacagcaccggtccgcgctggcaggccttttccaacaccctgaaaaaggtatggaacatcactgaagagcaaggcctgggtgaacacgaatgcaccatggcccgtacggttttccaggaacccgaccgggccaggcgatcgctgaaagacccttacgacagccatgcctacctggtagatatcgatatcctcaaggacggccagccccaccacactagctttctggacctcaccgtattggtgggcgagcacgacaagcgccagatggtcctcacgtactcgttggtgaacggatacgagacgttcgagtcactggacaagttcggcgcctcgctgcccgcgcgcttgagtgcgccagagcaggacaccaccttgcaatggcgcctgtacgagcctgacggcaacttcttcgatgcactggcctgcaacttgatttcgctgcagatccaagccatcggcagcctgggcgaatcccgtctgccggagcagatgcaggcccccaccctcgtccgtatcatgcccagcatcgaagagatgagcgaccatcaactgtcgaatatccgcgaggttcatcagcaaattccagattggctagcctcggcgaccgactctgatactaccgcttacagccgttacctgatcgacatggccctcctgcatagccattaccatggggagacctttcaggatggcatccctcctattcgtgactatgccctgtcacagttgcaaagccgtatccgcgcccccgaaaaggacgtgaacctgaacctggaaaaagttgagattgtgatcgagagcccggtgctgtggggtacgtttgtcgttcccggggcggtggatatcactcgtcgcagcctgatcgacctggccctggaaaaccttaccggcctgcccaccggcaacgcgacggtgcactacaacggcaaggacaataacgcacccgcctggctgacctaccgttatctgaaagacgtcatcgaagacatcgacatcggccagtactacccagccctggtcaaacagaaactgctcgatgacccgcagcaatcgagccaccgacagcagctctatacccgccacctgcaaatccaactgccgctgttggccctgcagatgaaaatccgcaatcagaacggcatcgatgagctcggttaccgctacgtcgccgcggtggtgcacgccgaggtacatgagcgccatgtcgacggacagccaatcgtcatccgaaacctggctttcatgcccaccctgcgccctggccatgagcaagatgtggtcgccaatatgttcgtgatcggcccgaggcgttccgaggctggcccctgcatactttatcgacccctgatggaaccggccctgatgcaatttgcgtcgcggcaaaacctgctatacgccatcaaacacgagcacgccttgcgcgagtcggtgttggcttggttgcctgaagcacagcgcttcaactatgcccaatacgtttttccagacaccctgccctcgccttggaccgtggtgcgcgcgctggtagaaccgctcaccgtgctttacatgagcggcccgataacgctgagcgatgaagaagtgggtaatgacaccctgacgacgctattcaagaccaacgccaatgcgatggtcgagttggctacacgccagtcagtgtccaacgtgcaaaaacgttgggcgacgttgcgacatgccggctggcagatattcaatgccgccctgcccttcatgggccgcaccctcggggttgccgcctggatctggcaaatcatggacgatctgcaagctgccggggaggcggtgaacaagggtgaccagagcgcttcctggacagcgttggcggatgtgttcctcaacttgggcatggcactgacgctgcacatcgccctacgccacccgcgcccgctcaagcaattcgatacccccacaaccgaggcagaatccgcgacaacgacgatcgaaacagcaggcaaaccggctattaccgagaaaaaatacaccgccgtacaacaggccactcttaccgacaaccaactgcccgcccagcatcaaggcgccgtgcacacccgcggtgccctgagccatagccgcctggggctgggcacgacactcaacagcttcaacatcgccaaacccgagatgctgggcgaacaagacaagacccccggtcgtcacctgaatctctatccgcttgcagacaagtggtatgcgccggtgggcgagcgttggttcgaggtgaaggtggatgacaacgacagcgtcattatcgtcgaccccaaggaccccttgcgtaccggcccaccgttgatcggcaacctggcgggccaatggtttgtcgacgtccggctgcggctgcgcggcgcaggccttcgaaaacaacgccgagccgtcaaggtcaaccaaactgagcgcatcccgcaacttaaggcccagctcaacacctttgacgcagttgccgccagtaaacagctggacgtacttgaatcaatgcctgcgccggacgcaactcccggcccttccaccgacctgcggcgtgcgtcgttcatcggcaaagtcgatagccggatgacggagtacgacgaagcgatcagccagttgaagtcgttgagtaccatcgacgccgtacctacctatcagagcaatatgagcgggtatctgaaacaacaggtgcaactgacacagcttgccttgcaacagcagttggtgagctaccaagttgccttgagggcgtcatcttcaatcctcgaagcggaggtagacattgactacaaacgccaggcaagcaccgcacaagccctgtccattcagaaccaggcgatcctcgagcgtttgaccttcataaatgatcggttcgacgatctcgaagagctgggggatgcaggcgccgcagtcattctgaaaagcaagcaggagttaccgcagctcaatctcgatgaactcaaatccctggaaatcggcttggtccgttacctgtgtatcgatgaagagcagcgccagattcccgccacgctacgtgaacggatgggccagatcgccgataccgccgaactcaacgtcgaaagtttcagtgagatgatggaacgggccgacagcacgtcgctggaggagcgtattgacgtactcaacagcctggttgagcaattttccagcgctgatgaacgcctgctggacctgcatgccgattacccgcagcacttgctcaaaagccgtttggaaagttttcgccagcagattgacgagttcaagcagcgggccgtgcacgacctggcacagttgctcagagagagaaaaaacctggagcccaaacccggtagctcaaaggcaaaaccaccaccacggcgcaaagtgatcaaaacgcgccatcacggcttggtgatgggcgaaccgcgtgaaagcgacagtacgctggtcgatgtcaagacaggcatgaccggcaaggtgatcgccacgttccacgagaaggcacccggtgtttgggtcaagagggagaaaaccccgtcacagcagcccacgcctgccaccgtggacctggacatcagcatcaacgcaggccaagcgttgttggatggcgaacaagcggaaatccgcaaataccagagcttcaccaagaaaccctggcatgccccgcaggacattcaagatatgttcgatggctatgcaagagacttggaaagagcctcaaacaacatcgaagaagccctgacccagcgcaacctcaccgaaagcgatcatacttccgccgccacgaccaaccgcgacctcagcgatgccgcgcaacgcttctatcggctaggcagaaaaacctacatcgagatgatcaagcatcaagcacccaccgccgagcgtgtcgagtggctgcacagccaagggctgatcagtatcgtcaaggtcgtcagccgccgtgccctgaaagggcccaacaaggactatctggacgagtacgagattcgcgataaagagagcggcacggtgctgtggtatgcgcactttcactatgacgccaaaggtgcggcgctggaggacttcaccgcagaccacctgaagacccgcgaacaacaacgcttaggaggtgctcgccagcgtaccggccccagcgactgggacaccatcgagattcaccgccgcaggattggtaaaccactggccacttcactgttcttcaaaagctgaacgcgttttacggcaaccacgcctggcgcaaacgggccagcgcttgtgcgatgtcggcttcgggcacggcggcgaaacccatcaccaggccggcacgctggtccggcggtgggctggggccggtcagccaatagctgctcaggccgttgatttccacaccggccgcgtgggcctgagtgagtagcgcctgctcacgggccaggctatccacgcgcaccgtcatgtgcagccccgccgccacactgggcaagacgccgacgccgggcaacccgtcgggccaaccggccagcaaggcattgcgtcggctcaacgcagcgcgacgcatgcggcgaatgtgacgctggaaatgccccgtcgccatgaactcggccatcaccgcctgggtgctgacttcggaatgacgcatatccacggcgcggcgccgggtgaaggcttgcaccaggcctggtggcaacaccaggtaacccaggcgtaacgccggaaacgccactttgccgaaggtgccgacgtacagcacgcggccattgcgatccagcgcagccaacggtgacagcggcgcaccactgtagcggtactcgccgtcgtaatcgtcttccacgatccaaccgcctgaacgttcggcccaggccaacagctccaggcgccgcgccaggctcatcaccacgcccagcgggtattgatgggaaggcgtgacatacgccacgcggcaatcattgagggtactgagcacctggcaatccatgccttcgccgtcaaccggcacgccatgcagccgcccgcccgccaaagcaaatgcatggccggccgcgcgatagccggggttttccaccgccacaccctctccgggttccaccagcaactgtgcacaaaggctgatggcctgctgtgcgccactggtgatcacaatttgttcagccgtgcattgcatgccccgcgagctgcgcaggtacgcggcgatcaaaccgcgcaggcggccatcgcctgccgggtcgccatagcacagctgttccaggtcgggcttgcgccagaacgccccattcagcttggcccagacctcaaacgggaacaggtcgaaggcgggtacgcccacccgaaatgcccgaggcggtcccaacggcggctgtggcagatggtggtctttcacccgcgccaacccggcactgtggataacttcgtcatccagatcctcgggcaaattcgcccattttgtggataaccctggggataagcctgttgacaaccctgtggatacttttgtggataattttttggccatcggcaattgggcaacataggtgccatcaccgacccggctttcgataaacccctccgcgtacagctgatcgtaggcgcgcaccacgctgttgcgggaaatcgacaatgccgccgccagatcgcgggtcgcgggcagccgcgtgccactgaccaatcgcccatccaatacccgctggcgcagggcctcataaagctggcgcgtgaggccctggcggcggtccaactcgataccggcagggttgaaggacaacggcggcgaaatgggcggcatattggacctatgaaattagcgctagatggctcttacaacgaaccaatagcctgcctaggatgcaggcattcgccaaggaaaatctccatgtacacaccccgcgcctttgctctcgatgacttgcccgaaatccagcaactgatccagcacacccgcttggcgcagttggtcaccgtgggtgaaaacggcctgcaagccagccatttgcccttgctgctcaaccccgatgaaggacccaacggcacgctgtacggccacctggccaaagccaacccgcaatggcgcgagctgcaaaacggcagtgaggcactggtgatcttcgcgggtgccgaggcctatatcagcccggcgttttaccccgccaaggccgagcacggcaaagtggtgccaacctggaactacatcgccgtgcacgcctatggcaagcccgaagtgttcagcgacgccgagcacttgctcaaggtggtcacggctcttaccgaccgccatgaaagcggccgcgcccagccctggcgtgtcagcgacgcaccggcggactacattgacggcatgctcaaagccatcgtcggcttcgccctgccgatcgagcgcctggtgggcaaacgcaaactcagccagaaccgcagcgccgccgacatggccggtgtccgtgatggcctggccgccagtgccgatgtacgcgaccagaccctggcccgctttattcctcaaggagtttcagaatgagcttgatcgacattcgccaggtcagcgccgccgaccacgccgcctggctgccgctgtggcaggcgtacttgaagttctataacaccgaactgccggacgccgtcagccagagcacctggcagcgcctgatcgatcccagcgagccgacccattcggcactggcctggcaggacggcaaggcggtgggcatggtcaacttcatttaccatcgctccaactggagcatcgagaactcctgctacctgcaggacttgctggtagacccggcccaacgtggcacgggcgtgggtcgcaagctgatcgaattcgtctacgccaccgccaaggccgatggctgctgcaaggtgcactggttgacccatgagaccaacgccacggcgatccagctctatgagcgcatcgccgaacgcccaggcttcattcaatttcgcaaaggtctctaaggagcgcagcatgactacttccctcgccgactggaaaggcgccccggcgcccagcgcgcacctgcttgaagggcgctttatccacctggaaaagctcgacccggcgcgccatgccgaccaactgtggcaagcccttgaaggcccaggggccgacccgaagctgtgggattacttgccctacggcccgttcaccgaacgcagtgccttcgacgcctggttgaacaatcacgccgcccacagcgacccgtactttttcagcgtgatcgaccgcgccacgggccaggtgcagggcatcctcagcctgatgtccattgtcccggcgcaaggccgtatcgaaatcggccacgttaccttcggcgcgccgatgcagcgctcgccgaaaagtactgaagcggtgtacctgctggccaagtatgcgttcgagcagggctaccgtcggctggagtggaagtgcaacaacggcaacgcgcggtccaagtacgcggccgagcggttggggttcagttttgaaggggtgttccgccagcacatggtggtcaagggacagaaccgcgatacggcgtggtattcgatcctggattcggaatggccgaaggtcggtgccgggtttgaggcgtggttgtcggaggcgaaccagagtgattcgggccagttgaagacactcacagagtgtcgggattaatgctcacatctgtgggagctggcttgcctgcgatacagacacctcggtgtatcaggcaaaacccgttgatgccatcgcaggcaagccagctcccacagttttgaccagcggtgaatcagtgggtcaggcgctgggccagcaccgcaatatgctccggcccgatgccgcagcacccacccaaatggctggcgccgcgtgcttgccaatccgccgcccattgcaagtagccgggcgggtcgaggtcgtcgcgcaacgggtccaggccgtcgttggccgtggcttccttgggttgcggtgggaaggcattggcgtaggcgccaatctggatggccacgcccagtcggtcgaaggtctggcgggcagcatcaatcgccgcgccgatcacttccggctggctgcagttgaacagcaatacctgcacgcccagttgcgccgccgcctcggctgcgtccgccaccggttcgccggagcgcaggcgcggcacctcgtcggtgtcttcgtctttcaaggtaaacgacagccagaacggcttcccatctttaggcagcccggcatggatcgcccgtgcttcagcgatcgagctctgggtttccgccagccacaggtctacatgcggggccaggccgttcaccaacggtgtcagcaactcactgacgcgctcggcctggaacagatcagggcgataagagccaaacagcggcggcaatgagccggctacctgcacggctttaccggaggcctgcaccgcccgtcgcgccaactcgccggccaacgcggccaacgcctggccttctgcggcaaaccgcttttcgccaatatggaacggcaccaccgcgtaactgttgctggtgattacattggcaccactgtcgatgtaggccgcgtgcaccgcctccaccgcttgcggcgcttcgctcaaggccagtgccgaccattccggctgacggaacggcgcgccacggcgttgcagttcacggcccatgccgccatcgagaattactgtgcttactgcgcccatatgctttttactcatatgcttatgaaaataactcactatgagagtcgttcttataactatttaatgcgtaccgttcggttaataacaacctcttttttattcaggtgttcgattttgaaattcagaccgctgttggccctgggcctgacgatgttggctgcttcaacccaagcctttggcggtgccacgctggatcgtgtcgagcagaagaaagaactggtcggcgtgctgatggaaagctatccgccgttttcatttctcaatgaccagaaccagctcgacggtttcgacgtggacgtggccaaggccgtggcacaaaaactgggcgtgaagttgcgcctggaaaccccgtcctgggacgtgatcgccgccggccgctggagcgggcgctacgacatctgcatctgctccatgaccccaagcaaggcacgcgccgaggtgttcgacttcccggtggagtactacgcctcgccggccgtgatcgtggtcaatgccaaggacgagcgcatccacgaagcccgggacctgagcggcaagaaagtcggcctcaccagcgcctccagctacgaaagttacctgaacaagaacctggtgatcgaaggcgccgaagacacgcagttgcagtacccgttcgaggaggtgcagatcgccccgtacgacaccgacaatgtggcattccaggacctgggcctgggcgccggcgtgcgcctggacgcgatcctcaccaacctggtcaccgcgcagccgcgcctgagccaggacaagcgcttcaagctcgccggtgcgccgctgtactcggagcccaactcggtggccatcgagaaaggcgacccgcagtgggacagcaaagtgcgtgaggtcttcgcccagctcaagcaggacggcaccttgagcgcgctgtcgcaaaaatggatcggcgccgatatcagccgatgagttttcgcctacggctttacctgacctgggcggcgctgttcggcctgtttgcgagtttcttcctgagctttgacctgaagttctcgatcatcctcgacaagctgcccaacctggtcggcctgcaccttgcgcccaacggcttcctgcaaggtgcggcgctgacgctgttcttgtgcctgtgcgccatcgtcacctcgtcggtgctgggttttatcaccgcattggggcgcctgtccaaaagtgcggtggcgttcggcatcgccagtttctacgcctcgttctttcgcggcacgccgctgctgatccagatcttgttgatctacttgggcctgccgcaactggggctggtgccaggcgccatcgtcgccggcatcatcgcgctgtcgctgaattacggcgcctacctgagtgaaattttccgcgccggcatcctcggcgtgccccatggccaacgcgaggccgcgctggccctgggcatgcgcgacagcgcgatcttctggcacgtgaccctgccccaggccatgcgcaccatcatcccgccggccaccaaccagttcatctcgatgctcaaggactcctccctgatctcggtgatgggcgtgtgggaagtgatgttcctggcacagtcctatggccgctcgagctaccgctatatcgagatgctcacgacggcggcgatcatttattgggtgatgtccctggggctggaattgatccaggcgcgcatggagcggcatttcggcaagggctacgtgcggcgcggttgacgtgcagaatgtgcaatatattgcagcgctcaggctgaataggctcaaggatctgcaatagattgcatattcattgtcgtcatcttttcgacacattcctgcaactcccctccgctatacaggtcgactcgcttgccataacaaggtcgcccagcatgcccccgtctccacaacgcctcgcgctcgccatcaccctgttggccggcggtggcttcatcgaagcagccgcagccaagaccctgcagatcgacacgcctgccacccaggggcaaaccctgggtggcagtgatacgttgaccacgtcggcgcctggcagcattacaacctccggggtagcagtgacgctcaaggacggcacccgcagtgcgggggtggtggtgactaacgcgggcaagctggtctccagcggcgggcggggtatcgacagttcggggagtgtcagcggggagcgcaggtacagcatttacaaccttgccggtggggtgatccaaggcgccaatgatgcgttgcgcatcaacagtaacgttgccagcggcagcgtgctgatcgacaacagcggcaccattcgctcggccaccggccaagggctggacctggatgcgctgcgcagcagtaacgtcaccaccacgatcatcaaccgtgccggtggcttgattcgcggggaggccagcgacggcatgaagaccggcgccaacgcttctatcactaactacggcgagatctccactggcgacaccttctcccgcgatgacaagttcgatggcgtggacatcgactccgccagcggcgtgacggtcaccaattacggcctgatttccggtggccgccatggcatcaccacggacgagggcgccacgctgaccaactacggcacggtgatcggccgcaacggctcgggctttggttccgatggcgacggcactgtggtcaaccacggcaccatcataggcgcgttctccggcctgcaaccggatggcgacggtgacggtgtggacatcgacaagatcgcccatatcgaaaactacggtgttatccagggtgtcggcgccgggggggtcgacaagaacggctttgccaacggcagcgaagggatcgccctgggcggcggcgctatctacaacgccaaaggcgcgctgatcagtggtgccaacaatgccatcctggtggacgacggcagcgacgggccggggctcgcggccaccaccctggaaaaccacggcacgattgaaggcctggatggctttggcgtgaagttcgtcggcaactatgccgatacggtcatcaacagcggcacgatcagcggcagtaatggcctggccctggatttgggcggcggcgatgaccagctgatcttgcgtaacggtagccgctttatcggcacggtggacggcggcagcggttacgaccgactgaccctggacgacgtcgccggtggcagttttggcgacagccgcaacctcgaacggctgaacgtcaagcaaggcacctggacgttgaccggccaaggtgatttcagcgacggcggcgagatttccagcggtgccaagctggtcaaccaaggcggcattgtcggggacgtgacggtcgacgcaggcggtgtgtatgccggcggcggctcggtgggcagcctggtagtgaacggcacgctgcagaccaacaccgagttgggcaccgccagcatcaaccgcgacttgcgcatgggcagcggctcgaccctggcctatggcgtcaacgccgacggcagcagcgcgccgatcaaggtcggcggcaccgcttacctcaatggcgcgacgctggcggtcaaccccggcgaaggcacctacccctggcaaagccattacagcgtgctgcaagccggcagcatcaatggcacgtttggcaaggtcaccagcgactacgccttcctgaccccaaccctggattacagccccacccaggtcggccttacgtacacccgtaacgacatcgccttcaaccaattcgccagcaccggcaatggcgccaacgccgccaacagcctggcaggcctgggcacgaacaacccgctgtacaacgccctgctcaataccaccaccgccacagccggtgccgctatcgagcaactggcgggcagtagcaccgccaacctcaccagcgccaccctcaatgccagtgcgcaagtgggcaacagcatgctcgccgccatgcacaaggtgggcggcggtgcgggactgctggtagggctcaatgacaaagatacaccggtactggccgccaccggcgtgcccgccgaggtgcgcaacctcaatgacccgaatgcccgcggccgactgtggctgcaaggcatcggcagctacggcaagcttgatggcgagcacggcagcaacggcttgacccaacgcaccaaaggcacagtgctcggcgccgattgggcgctggacagcgactggcgcttgggtgtgctagggggttactccaagaccgacctggacaccaccggtgtcgacggcagcgtcgacagctggcacgccggcgtctatgccctgcgccagagcggcccattggcgttgcgactgggtgcggcctacagcgggcaccagggcgacagtaaacgcacgctggccttcagcggttttaacgaccgcgccaaaggcgactatgacgccaacagccagcaggctttcgctgaactgggctacgccatgggcagtggtcgcttgagcgcagagccgttcgccaacctcggctaccagcgctatcagcgcgacggttacaacgaaaaaggcggcgccgctgcgttgcacgtggaaggccagacccaggacaacttcagcagcaccttcggcctgcgcctggcccacctgagccagctggacaacggcgtcagcctcacaccccgtgccagccttggctggaaacatacctatggcgatgtcgacagcaccacacgccaggctttcctggccggtggcaccgccttcaatgtgcaaggcagcgccctggaccgcgacagcctgttgctcgaagcgggcctggacgtaggcttatccgcccgtcatcgcctgggcttgggctataccggcgaagtgggcagcaacagccgcaaccatgcgctgaccggccaatggcagatgagtttttaatcgcaccgtactagagacaactcccgcacatcagcggtcgataggctgacagttatccccccgcgcctcgcctaaattcccggcctcattcatcagaggttgggaattcatgccctttacacttcaaagaatcgcaatcgtcatcagcttggcagtggccgccagttttcagcctgcccatgcgcgcggcgatatcgaatacaagccctacggcagctatccctatgacgccgccgactatagcggagtatttataccccagttcgaagcgccgccccttccaccgcccttcaacgggttcctcactcagcaggccacttcgcacaacggcctgcaggtcgccaaggtgctggagcccgcagtgattcaactggtggcctccggcgagttggacgcggaagacctcaaggacctgcaaaaatcgctcgagcaattgagcaagcaacctggagggatcggcgcagcccttgagcaactggccgccagccaaaacgccaacttggccaccgcaacccaggccaccacccagcacctgagccgccaattgctcgccaccctgcgcacactgcctactgacgacgacggccacttctgggtgcaaggcctgggcaacggcggcagcctagacgcacaacacggcagcgccggcttgaaacacgatacccaaggcctgttgctgggcgccgactgggcgatcgaccatgcctggcgggtgggtgtcatgggcgccaagacctccagccgcttcgatgccccgcgttatgccgccgacctggacagctggcacttgggcggctacgccgtgcgccaggacggccccttcgccctgcgcctgggggcgatctacagcaaccatgccgggcagaacaaacgcagcgtcagcctgctcaattaccacgactcgctcaaaagcaaatacaacgctagcagccagaccctgttctccgaactgggctatcaattgggcagcggtgattccactgtcgaacccttcgtcggtctcggctaccaacgctatcagcgcgaccgtttcaaagagagcggcggcgtgaccgcattgaacgtcggcccacaaacccagcgaaacctgaacagcacctttggcctgcgcctggcaacgctgtatcgcttcgacaacaacatgagcctcacgccccacctcagcacgagctggaaacacctctacggtgacgtcaacagccaggtccgccaaacctcgcgctatgcaccgggcctgatcgacgagtacaccatcaccggcaccgccctggaccgcgatagctttgacttgcaagcaggcctggaccttgccctgtcgacccaacacagcgtcggcctgacctatagcagccaagcaggcaaccatggccacgaccaaggcctgatgggccagtggaaaatgagcttctaagcccgtgaacgcctgaattgcaggcgaaaaaaaaggggagcacctgcccccccgaggattaaacgtcagtttcgaaggctgtgatcagccttcgatctcaatcaggatttcgccagggttcacccggtcgcccttggccacatgtacagcgctcaccttgccggcaattgctgcctgcacttcggtttccatcttcatggcttcggtaatcagcacggcctggccggccttgaccacgtcgccgaccttgaccagcacatcgacgatattgcccggcatggccgtgctgacatggccaggttcggtcgcgtgcttgcgcttgctgccgccgctgctgacaaactcgttgagcggttcgaacaccacttcttccggcatgccgtcgatggacaggtagaagtggcgcttgccttcggccttcacgccgacaccggtgatatccacgcggtagctttcgccgtgcacgtcgataacgaattcggtcggtacgccttcgccgccagcacgggccacgccgcccgcttccgggatcggcaacagcacttcaggagccagggtgccggcgtcgcgttcttcgaggaacttgcgcccgatgtccgggaacatagcgtaggtcagcacgtcttcttcggacttggccagtgcgccgatttcgccgcgcagcttggtcatttccggcttgagcaaatccgccgggcgcacgtcgatcacgtcttcgctgccgatggcctggcggcgcagtttttcgttcaccgtgcccggcgccttgccgtaaccgccttgcagatagagcttcacttcgttggtgatggtcttgtagcgctcaccggccagcacgttgaagaacgcctgggtgccgacgatctgcgaggtcggcgttaccagcggcgggaagccgaggtcttcacggacccgcgggatctcggccagcacttcgctcatgcggttcagagcgccctgctccttgagctggttggccaggttggagatcatcccgcccggcacctggttgacctgcacacgggtgtcgacggcggtgaattcgctctcgaactggtggtacttcttgcgcacggcgtagaagtacaggccgatctcttgcagcagctccaggtcgaggccggtgtcgaactcgctgcctttaagggcagcgaccatcgactcggtgcccggatggctggtgccccaggcaaagctggagatggccgtgtcgatatggtcggcaccgttttcgatggccttgagttggcacatcgcggccaggccggcggtgtcgtgggagtggataaagatcggcaggttctgctcggctttgagtgccttgaccagttcgccagtggcgtagggcgtgagcaggccagccatgtccttgatcgcgatggagtcgcagcccatggcttccaattgcttggcctgggccacgaacgcctcaacggtatgcaccgggctggtggtgtaggcgatagtgccttgtgcatgtttgccagcggccttgaccgcttcaatggccacgcgcaagttacgcacgtcgttcattgcatcgaaaatgcggaacacgtcgataccgttgaccgccgccttggccacgaaggctttgaccacgtcgtcgctgtaatggcggtagcccagcaggttctggccgcgcagcagcatttgcaggcgtgtgttaggcagcgcggcgcgcagttggcgcaggcgctcccacgggtcttccttgaggaagcgcacacaggcgtcgaaggtcgcgccgccccagacttccagggaccagtagccgactttgtcgagcttgtcgcagatcggcagcatgtcgtcggtgcgcatgcgggtagccagcaacgattggtgggcgtcgcgcaggatggtgtcggttacgaagatcttcttgctcattgttatattcctcacaggcctgcgtgggcggcgatggcggcggcgatggccagggccagctcttcgggtttgcgcttgatcgagtagttggtcagctcagggtggctttccacaaagcttgtattgaactggccgctacggaattccgggttgcgcaggatttcctggtagtaggcggcggtggtcttcacgccttgcaggcgcatgtcgtccagggcacgcaggccgcggtccatggcttcttcccaggtcaacgcccacaccaccagtttcaggcacatggagtcgtagaacggtgggatggtgtagccggtgtagatcgccgtgtcggtacgcacgccagggccgccgggggcgtagtaacgggtgatcttgccgaagcttgggaggaagttgttcttcgggtcttcggcgttgatgcgaaactgcaacgcgaaaccccggtgctggatgtcttcctgcttgaccgacaatggcaggccggaggcgatgcggatttgctcgcgaacgatatcgatgccggtgatttcttcggtgatggtgtgttccacctgcacccgcgtgttcatctccatgaagtacacctcgccctcggcgagcaggaactccacggtgccggcgttctcgtaacccacagccttggccgcgcgcaccgacaggtcgccgatgtaggcgcgctgttccggggtcagttgcgggctgggggcgatttcgatcagcttctggttgcgacgctggatcgaacaatcacgttcaaacaggtgcaccacgttgccaaagctgtcaccgaggatctgcgcctcgatgtgcttgggattgacgatgcatttttccaggaacacttccgccgaaccgaaggccttggtggcttcggaaatcacgcggggaaaggcttgttcgagttcttcgcgactgttgcaacgacgaatgccacgcccgccgccaccggaggtggccttgagcatcaccgggtaaccgatgcggtcgccttcggtgagggcttcatggatgtcggcgacgttgccttcggtgcccggcgtaaccggcacaccggccttgatcatgctgcggcgcgcttcggtcttgtcgcccatgcggcgaatcacttctgccgaggggccgataaacttgatgccgcgttcggcacagatgtctgccaactcggcgttttccgacaggaagccgtagccggggtgcagcgcatcgcaaccggtttccaccgccaggttcaccagcttgcgcgggttcaagtaaccggccagtggctcggcaccgatgctgtgggcttcgtcggcacgcttgacgtgcaacgcgtggcggtcggcgtccgaataaaccgcgaccgagcgaatgcccatctcggcgcaggcacgcacgattcgtacggcaatttcaccacggttggcgatcaggatcttttttatcacttggaaattcccttgagccgatttgcgtgcttcgacccgttgcagccgggccggcgcgtgaccaaatgtttcatgacagtcgcgagacacacactatgcgcataggagaattaacaaaaatcaataattattgggttgtgtataagtaaagacttatagttggccggacaacttgggagctaagggcttataaaatgcgtaagtcattgatgcgtatgacattgcgtcaattgcagatcttcaatgaagtgtgtgatttgcgttcctacagccgtgccgccgaggaaatgtccctcacccaaccggcggtcagcctgcaaattcgccagttggaagagctgatcggccagccgctgttcgactatgttggcaaaaagctctacatgaccgaggctgccgaagccctgcaacgggccagccgcgatattttcgggcgcctggaaaacctcgatatgcagctatcggacatgcagggttcactgcaaggccaactgaaactggcggtggagtccagcgccaagtatttcgtgccgcacctgttcgccgccttcaagcgtcagcatccggaagtgcaattgcagctcacggtagtcaaccgtgcccaggtgatccgcaggctctcggacaaccgcgacgacctggtgatcatgtccatggtgccccaggacatgggcctggagttcctgccgtttctcaacaacccgattgtggccgtggcattgccggatcatccgttgagcctgcaagggccgctgcgcctgcaggacctggagccttataccctgctcatccgtgaaccgggctctggcacacggctggcctgcgaagagtacttcaaggaaaaacgcgtgcacttcacccagacggtagaagtggcctcggcggaggcgcagcgtgagtgcgtggtcgcagggttgggcgtggccctgctgacgcgccacgccttgaacctggagctggccaccggcgggctcaaggagctgccggtggaagaactgccgctgtaccgcagttggtgcctggtgcaggccaaggctaagcgcctgtcaccggtggcccatgcgttcctgggctttattcgcagcgaacgggtgcagatcagcgcgttggctgagcgtttcgctgggcagccacgggtgcctgccaatgcaattccgggtagtcactgatgctctggagcaactggcgctcctcacaacggtcttcgatggcgcgacggaacgccatgcggcgctggtcttcctgctgacgacgggtcttgacggtgctgttgctgtcttcgtagggccgggtcatttggagtctcccaatgcgagtacggggagtacaggatgggcgtgggggatgacggtttggcggcgcgggggttacaggatgatgaatcttgcgaaactggcgcaaattccctgtgggagctggcttgcctgcgatggcggtgtatcaggcaatgaagagggtaactggcagaccgctatcgcaggcaagccagctcccacaggccctcagtcgtcgagggctttgacggacttgggcgacaaccgcaggctgcgcaagctgcgcttcacgctcttgaggtggttgaccaggctcgggccacgggccatggccacgcccatcgccagcacgtcgatcaccaccaggtgggcaatgcgtgaggtcagcggcgtgtagatttcggtgtcttcatgcacgtcgatcgccaggttcaccgtggacagctccgccaatggcgtctggctcgggcacagggtaatcagcgaagcgccgctctcacgcaccaggttggcggtgatcagcaggtctttggaacgaccggattgggaaatgcagatggccacgtctgtgggcttcaaggtcaccgccgacatcgcctgcatgtgcgggtcgctataggccgcggcggtcagcagcaggcggaagaacttgtgctgggcatcggccgccaccgcgccggacgcaccgaagccgtagaactcgacgcgctgggcctgggacattgcggtcacggccttttgcagctccaccgggtcgagcttctcacgcacttccatcagggtgtgcaaggtggtgtcgaagattttcaggctgtagtcggcgacggagtcgtcttcatggattgcaaactggccgaagctcgcaccagcagccaggctttgcgccagcttgagtttcagatcctgaaacccggagcaaccaatggcgcggcaaaagcgcacgatggtcggctcactgatgcccacgctgtgggccaggtcggccatggaactgtgcatcacggccgcagggtcaagcagcacatgatcggcaaccttgagttccgatttgcgtaacaggtggcgcgactgggcgatatgttgcaacaggttcaaagggcaggactcttgttattggcagacgccagggatgtagcaagcttgtagttatactacaagaattgtcgttttgcccgtccgatgcatcactaaatcgccccgctccccccctgattcagcgggcaggcgctatgtagccataaaggcggcctacgctgcgttaagaaaaatctgcatttttacgtaacaaatccgccagcccttcggcccgcatgggcgggctgatcaggtaaccctgcacctcgtcacactgctcgccgcgcaggaaatccagctgctgctgatcctccacaccttcggccactaccttgagcgccaacccgtgggccatggcgatgatcgcgcgggtgatcgccgcatcttcgcgtccctggccaagcccgcggataaaggcctggtcgatctttacgtagtccaccgggatgcgcttgaggtagctgagggatgagtaaccggtgccaaagtcgtcgatggccagcttcacccccaggtcgcgcaattgctggaaggtggcgatgatgtgttcaacgctgtcgagcaactggctttcggtcagttccagctccaggtattgcgggtccagtgcggtttcttccagcacttggcgtaccaggctgaccagcttgccctgacgcagctgatgcaccgacaagttgaccgacacgcgaatcggcgccagcccctggcgctgccattcgcaggcctgccagcaggcctggcgcagcacaaattcgcccaacggcacgatcaagccggtttcttccgccaaaccgataaagtcacccggcggcaccatgccccactgcggatgctcccagcggaccaacgcctcggcagcgttcagtttgccagtggccaggcacagcttgggttggtagaacaccgtgagctgacgctcgtcgatggctttgcgcaggtggttttccagctgcaaacgctccagggtgctggcttgcaggctgtcggtgaagaactggaaattattcccgcccaagtgcttggcatgctgcatcgccatattcgcttggctgaccagcgcagaaatttcccgcgcgttatccggcaataggctgacgcccatcgaggcgctgaccaccagttcatgcccctccacattcaccggcacgcgcaatttcgccagcagccgggtcgccacccgcgccaggctcgataagttgccataggcgtcgaacagcacggcgaattcatccccggacaggcgcgcgatggtgtcggcctccggcagcgcgttgatcaagcgccgtgccattttttgcagcagttggtcagccacttcatggcccaggctgtcattgagcaatttgaagcggtcgaggttgatatgcagcagcgccaggctgcgcccgccttggcgcacgcgctggtgagcttcgcgcagccgttcgcgaaacagcgaacggttggccaggccggtcaactcgtcgtagtgagtgaggtagcgcatacgctcttcagactcgcgccgcgccgacagatcggcgaagaaccctacaatatggctgacatttccccgtacatcgcgcaccacgttcagctgtagccattgcgggtagagttcgccattcttgcgcgtttccaccaattcgccctgccacgtgccgtggctgagcaatgcctggcggatcagcgggaagtggcggcgggcatcgcgactgcagggcagttccacgacgttgcggccaagcatgtcgtcgatgtcaaagccggtgacgcggctgaacgcctggttcacggcgatcaacgcatagttcgggtcgaggatcacaatgccttcgctggccgcctcgaacaccgtcgaagccaggcgctgctgctcttccaccgccttggcggcactgatgtcacggcgcgtgccgagcatacggatgactcggccactgggcgtgcgctccacggcgcgcccgcggtcttgaatccacacccaatgcccatcgccatgacgtatccggtattccacctgatagtcctcgctgcggcctttgagatgctccaccaacgcgtgcttgagcaagggcagatcgtcggggtgcaggcgcggtttgaggtggctgagcatcgccgtgacgtattcgggctccaggccaaacaactccttgagctgggtgtggtggacctcgtcggtttgcaggttccagtcccacaggcccagttcactggcttgcagggccatggccaggcgcgcttcgcttttactcaaggcgagactggcagcatccagttgctggctgcgttgcgccacacggtcttgcaggccgacctgggcttcacgcaagtcctgctccacctcgcggcgctgctcgacttcgcgcaccagctcctggttcaactgctcactgcgttgctgcgcctgctgtagatgctcgatcagggcctggttctggaaacggcgcaacagcccgcgctggatcaggcggttgacctgccacgcgaccaggctcagggacgccagtaggatcaggccgagtacgccccagccttgttgctgcggggtgccatcccagaacaggtagacgatggccggcaccaggcacggcaaggcaaacgacaggtaggcccacaggctcacggcataggccacgctggccgacaaggtggcggcgccaatcaggccaaacacccaggcctgatgcatgaagctgtccgtgggcaccagggcaatggccgcaaccgagagggtcaggccactgaccgccgagccgagcatgaacatacgccgccacacgggctgggcctggcggctgggcatggccgagtcaaaggccgccacttggatcacgcgcattgccaccagggcgagcagccagagcagccagacgctgtccagcaggtactgatcggggttccacagcagccaggcgcagaccaggccattgaccagcatcaacagcgtcggcagcaacgaaccctgatacagcaggcgtgtgcgctcaaccgcgatttcggttgcatagtgtttatggatgacctgtgctggggccggcgagaggccaaacaggtcggtgctaagggtcataggcggtgttcttataatggtgagcccgaaacgtcgacggagcatacacaagcaagcgcccgggccaaactgctacaagtcataaaaaacctgttgcgattggccgcaaacctttggcccagaccgcttgggcaagacacggcacgggctgcggccgatgaccaaccggtcatcacccacgccagaatgtacgcccccggcgctagcgtgcaggcgttttgcatcgaccatccggcattgggatttgcccaggccccccaaggcccatagaatgcgtcgatgcgcgatgatctctctcttttgctgaactccctcaacgatgcccaacgccaggccgtagcggcccccgttggccgtcagttggtcctggccggtgctggctccggtaaaacccgagtgctggtgcaccgtatcgcctggttgatccaggtcgaaaacgcgtccccgcattccatcctgtcggtgaccttcaccaacaaggccgctgccgagatgcgtcatcgcatcgagcagttgatgggcatcagcccggccggcatgtgggtgggcaccttccatggcctggcgcaccgcctgttgcgggcgcattggcaggaagcggggctgagccagaccttccagattctcgacagcgacgaccagcaacgcctggtcaagcgcgtgatccgcgagctgggcctggacgaacaacgctggccggcgcgccaggcgcagtggtttatcaacggccagaaagacgaaggcctgcgcccgcaacatatccaggccagcggcgacctgttcctagccaccatgcgcagcatttatgaagcctatgaagcggcctgcgtgcgcgccggcgtcatcgacttctccgaactgctgctgcgtgccctcgacctgtggcgcgacaaccccggtttgctggcccattaccagaaacgcttccgccacattctggtggacgagttccaggacaccaacgccgtgcagtacgcctggttgcgcctgctggccaagggcggcgacagcctgatggtggtgggcgatgacgaccagtcgatctacggctggcgtggcgcgaaaatcgagaacatttaccagtattccgaagacttcccggacgcggtgaccatccgcctggagcagaattaccgctccaccgccggcatcctcaaggctgccaacgccttgatcgccaacaacaccgggcgcctgggcaaagagctgtggaccgacggcggcgaaggcgaagcgatcaacctgtacgcagcgttcaatgagcacgatgaagcgcgctacgtggtcgaaaccatcgaaagcgcactgaaaaccggcctggcccgcagcgatatcgcgattctgtaccgttccaacgcccaatcgcgggtgctggaagaagccttgctgcgcgaacgcatcccgtaccgcatctacggcggccagcgcttctttgaacgtgccgaaatcaagaacgccatggcctacctgcgcttgctggaaggccggggtaacgatgcggcgctggagcgggtgatcaatatcccggcgcgtggcattggcgagaaaaccgtcgaagcgatccgcgaccatgcgcgccatgccgatgtgtcgatgtgggaagccatgcgcttgctgatcgccaataaaggcctgaccggccgtgctgccggggcgttgggggtgttcgtcgagctgatcgagaacctggcggccaagtgcgcagaaatgccgctgcacctgatgacccaaactgtcatcgagcagtccgggctgatcgcctatcacgaagcggaaaagggtgagaaaggccaggctcgggtagaaaaccttgaggaactggtcagcgccgcccgtgcgttcgaaaacaccgaggacgacgaagagctgacgccgctcgccgccttcctgggccacgcttcgctggaagccggtgatacccaggccgatgagcatgaagacagcatccagctgatgaccttgcacagcgccaagggcctggaattcccttacgtgttcctggtgggcatggaagaaggcctgttccctcacaagatgagcctggaagaacctggccgtcttgaagaagaacgccgcctggcctacgtgggtattacccgggcgatgcagaacctggtgatgacctacgccgagacccgacggctgtacggcagcgaaacctacaacaaggtgtcgcgcttcgtacgtgaggtgccgaaggggctgatccaggaagtacgcttgtccaacagcgtcagccgcccgtttggcggtggccagcaacagaattccagcagcctgtttgccggctccgaaataccagaaaccccgttcagcctgggccagcaggtcaagcatgcgatcttcggcgaaggcgtgatcctcaacttcgaaggcgcaggcgcccaggcgcgggtgcaggtgaacttcgccgagggcagcaagtggctgatgatgggttacgccaagctcgaggctatctgaaccccattcctgcaggagcgagcttgctcgcgaagaacgcccagacaatgcgttcatccagaatgcccgcgtgatcgttgacgattttcgcgagcaagctcgctcctacgggaagatacggccgcgcccttgtatttcacgcgtgcgggccaatatctgtaattagtcctacagacccttcggatttggtcttacgcaaaagcccgaaacattatgccgctagccactgccacgacacctgtgcaacatggcgcgcgtgcaatccacaaatgggaattccctatatgaaacgttttcttagcatcgccatggcgttgtgcatcggcctgacgatgagcctcgacgccaacgccaaacgcttcggtggcggcaaaagctcgggcgcggcaccgactcaccagaccagccaaatggctccatccgccggtgcgggcggtgctgcggcgactgcaggcggtgccgctggcgctgctgctaaggccggcggtgcttcgcgctggctgggcccactggccggcatcgccgccggtggcctgctggcgtccatgttcatgggcgacggctttcagggcatgcagatcttcgacatcctgatcatgggcgtcatcgcctttttggtcttccgctttatcgccgcccgtcgccgcaagcagcaggagcacctggctccagccggcgcgccaatgcagcgtgaagcgttcgaacagaagcctgccatgggttcgatcttcggtggttcggcagctcctgccgcccgtccggtgatcaacgcaccggcctggttcaacgaagagcgtttcgtcgaagcggcccgcagccacttccagtccctgcaacagcactgggacgccaacgaaatggacaagatctccgagttcgtgaccccgcagctgttggagttcctcaagcgcgaacgtgccgagatcggtgacgccttccagtcgacctacatcgacgacctgcgcgtacagctcgatggcgtggatgatcgcgccgacaagaccatcgccaccctgactttcagcggtgtgtcgaagtcctcgcgtttcgaccagggcgaagtgttcagcgaaagctggaacatggaacgcgcccagggcgacgaccagccttggctggtcgccggtatccgccagaacggttaatacctgcgcggttgagcaagcggtaacaaaaaccccggacatgtccggggttttctatttcacggttgcacttatagcgagctactgtataaaacgcccctataaaccgcgccatctagcaagaggatcccggccgtggaagaaatcatcgaacaactgcgtgaagccaacgaaccggtcccggttcctttggagctgcctgacgaagaccaactggtggaaatcgaagaacaactgttcatcgacatcccctttgtcttccgcgaattcctgctgaccgtcagtgacgtggtctatggcagcctggagccagtgaccgtcaccgacccgcagtcccacacctacctgcctgacgttgccgccaacgcctgggatgccggcgttgatcgcagcctgatccctatctgccaggacggcgatgactactactgcgtcgaagaagacggcaccgtggtgttgtggtctgccgaagaagaactcgtccaggaagaaacctgggaatcggtgtggcactgggcgcgggacgtctggctggaaagctgagtcccttgtagaagccgagcttgctcgcgagaaacctgagggcgccgctttgtgtcaggtttcccgcgttatcgttaacaatcttcgcgagcaagctcgctctactgtgtatccttgtggttatccagcgtctccagcaacgcaacctgcatccgcgtatgcacacggataaaccagcgccagagcactgcagccaccgccgccgtgaccacggcaatcagcaccagcaacttgttggtcggcagaatactggccgacaaggctgccaatagcaggaagattaccagcagcgacaagatcgggatcagctcggcaatcacccgtcgcacacgctgggtatgccgtccggccatttccggcttcacgctcatctccgccagcagcatcgacaacgccttgagcttgcgatacgccgcaatcagaaacggcaacgacaccagcagcgccccgccccagatcaacgccttctgccagctctgatcgctgacccagccctccagatacccaccgatgcgctccgcgaaaaagctgccggcaaagaagatcgcgatcaccaacgccaggtttaccccgacctgcaggatgatcttgcggatcatcgcggccaacatcgccccctcgccctgaggcgaaatgctgcgcagccattcgccatacatgccgaacactcggctcatacgcttgggcatcaccgccgcgatcttcaacgacagtgggtccgcgccacgaatcaggtagggcgtgagcagcgtggtgatcgccgaaacggccaccgccacggggtacagaaagtcgctggtgacctgcagggtcatccccagcgccgcgatgatgaaagaaaactcgccaatttgtgacagccccatacccacccgcagcgaggtgcgaccatcgttgccggcgataaacgcgcccagcccgcaagacagcatcttgcccagcaccacggccacggtgatcactgcaatgggccaggcgtattgcagcaggatctgcgggtcgatcatcaagccaatcgccacgaagaaaattgcgctgaacatgtcgcgaacgggctcgattaggccctcgatcttaatcaactggcgggattcagccatgatggcgccaatcaggaaggccccgagcaccatgctgtattccaacttcaccaccagcaggcagaaaccgaaacacaggcccaacacggtgatcagcagcatctcgttgctttcgaacttggccacataggccagcaggcgcggcaccagcaaaataccaatcaccagggcgacgatcatgaacaacgagagcttgccgaccgtggagaacacctcgccggagctgaccgtgccactgacggcaatgctcgacagcaaggcaatgatgccgatacccaggatgtcctcgacaatcagcacgccgaaaatcagctgggcgaaccgctggtctttcatcttcaggtcgttgagggccttgacgataatggtggtcgaggagatcgccaggatcgcgccgaggaacagcgagtccatggtgctccaatcgaaccagcggccgatctcgtagccgatccagatcatcagcacgatttccaggaacgccgcgataaacgccgtagctcctaccttgaatagcttgcgcaggctgaattccaagcccagacagaacatcaggaagataacccccaactcggccagggtcttgatcgtgtcttcgtcgtggatcaggccaaacggcggggtgtgggggccgataatgaagccggcgacgatgtagcccaacaccaccggctgcttgaagcggtgaaacaggatggtgaccacccctgccaccagcatgatcacggccaagtcctggataaagctgatggcgtgcatggcgaggggctccttgagggtgccggcacttttcccacttccggccgcgcctttgaagggtcggaaaagtctgccttgatcgtaagaaaagccctgagaagggcttttgaagggtaacaccgcgacttctgctggaaagccggtgcaatatatggaaacagatcgctgcgcgcgtgacggcaagccgcctgacggcgtcccgttagggatggcgctgcaaagactttgagtacccgcagaggtgccttccccccaaccaatgcctacaacccgtgagtgtgctatggaacccggaaacgcccagctgtcgatgacggtactgatgacccctgacatggccaacttctctggcaatgtgcacggcggcacgctgctcaagtacctcgacgaagtggcctacgcctgcgccagccgttatgccggtcgttatgtggtcacgctgtcggtggaccaggtgatctttcgcgagccgatccatgtcggtgaactggtgaccttcctggcgtcagtcaactacaccggcaatacgtcgatggaagtgggcatcaaggtggtgaccgagaacatccgtgagcgctcggtgcgccataccaacagctgcttcttcaccatggtggccgtggatgaccagcgcaaacctgccgctgtaccgccgttgcagccgcagaacagcgaggacaagcgccgctttgtgcaggcccagcagcgtcggcagattcgccaggaattggaaaagcgctaccgggaaatcaaagccgacgcgccgtaaactccaagcggtgaatcaactcaaaaaagtgtgggagcgggcttgcccgcgatagcagtggttcagtcgacatctctttgactgagactccgtcatcgcggccaagcccgctcccacattgggatctgtgtcattacaggctgatcggtgtggcttcgaagcgcacacgcggatgggcaatacggtcctgggcccgcaccagttccagttcataactggcgcaggcctgggtttccagcagcacttcatgcacggccgcagcggtgaactcaaaagcggccaccaggctatcgcccaacagtacccgcgccaggaacaggccggacgtcaggtcgcccacgcccactggctgacgcggaaacgccagcagcggtcgacgtaagtgccaactgccatcagccgtcaccaacagcatttcaaacccttctggcagtttgcctgggtaatccaggtgcttgaccagcaccgccttgggcccacgcgccagcaatgccttggccatcgccaggcaatcgaacagcgattgcggcttgcgcccggcaaagctgtccaactccagttggttggggcacaggaagtccgccatggcggcagcctcatccaaaaggaaatcgctgacctcctgcggcacgatgcagcccttttccgggtggcccatcaccgggtcgcacaggtacagcgccttggggttgatcgccttgatgcgcgccacaccgctgaggatggcgcggccctggtctgcactgcccaggtatccggacagcaccgcatcacaattgcccagctcaccaatcgcggcaataccctctaccagcgcaggaatttgctgcggcgccaacacttcgcccgcccactgtccatactgtgtgtggttggagaactgcaccgtgttgagcggccagacgttcaccccgacccgctgcatggggaacacggcggcgctgtttccggcgtggccgaagaccacatgagactggatcgcaagcaggtgaggtgtacgtttcatgcgggagatttccgtaaaaccgttgaatttctggccgagcagtatgcgactaaacgcagcctgtacgacagaccggcgacacagttaagctgcgctcactttgttggagttcatggaatgctgaccctgggaaacatcttcgtcttgatgctgctggccaccggcgccgcctgggtttggcacaaccacggcctgcgtgaacgggcgttggcgcgggtcaagcagcattgcgccaagctcgatatcgagctgcttgacggtgccgtggcgctcaaacgcatcggtttcgtcaaggatgccaatggccgtcgacgcctggcgcgcatctataatttcgagtttacggtaaccggcgaaacccggcatgccggggtcatcacccaattcggcgcccacagcgcgcagatcgaactggcgccctacccgttcgaaaccaaagagccgctgcccagcgccgagatcatcgaattgagccagtggcgccaggaccacgccagcaagaaacatcagtaacggcaggctgccagggcgctctgcaatgcggccacgtcctgtggtgcgctgaagatcaattcaacgcgtgaatcgcgccgccaagcgctgggttgccagtgcagtggactgttatccaccgcgttggcggacacccagccgtcaacactgtggataaccaatttggcccggcgccagcccaaactcgatagccactgatgcagacggctaacatcgaatcgctggcttgggtgccagcgccagccgatgctccagccgccctcctggctctgactcagacagatcggcagccccgggtcgctccagatcgccggcatttgccccaccgcttcaggaacgccgaaattatccacagctacttgggcctgtgctttcaaaccgggcaaccggtcgagtggcagttgcgcctggcgtgtccaatggagcgggcaatcgggtaattgcgcttcaatcgcctgacgttgcgctgcggtcagcgtctcgtccttgttcagcaccagcaggccggcactggtcaacgcctcctgttgtgcctgcggcaacggcttgccggccgccagagcctgggcatcgagtaccagcacgcaaggctgcacggccagcacgccttgccatggtgcctgccgcagttgcttgagcaattgcgctggatggcccaagcctgagggctcgataaacagccgatccggcttggccttacgcaacaaacggcccagccctacctggaatggtgcaccgttcacacagcacaaacagccgcccgccacctcacccaaggcgataccttcatcgtcttgtgtgagtagggctgcgtccaggccgatctggccgaactcgttgatcagcaccgcccagcgctcgttggccgggcgctgggcaagcaggtgcttgatcaggctggtcttgccggcgcccaagggcccggcaatcacatgggtaggaatgttctgcagcataagaggcatggttcaggccgtttagagcgtttgatcctacgcggttatgccagccaatccagcgtcaggatcaaccgtcgctcatcggccttgagcgccggcgagcggtggatcaggccatgcccttcattgccgtgccatttggtgcctttgagcagcgccacctcaccgcaatggatctgctcgatgcgctccgtgggctcggcatccacctggctcaatgcgcgccggtccatgacgccttcacgcaaccattggctgccgataccggcgtaggtggtgatcagccgaaccggtacgtgatcgacgtgaaaacgcgggcacatggccttgtccaatagccgtagacgcacgccgatgcgcttggcgcccagcaggcaggcgaatgcactgatcagccacgacacatcggcgataaacccatcgtagccttcaagatcgcgacagctggacgccaaaccctgcaagttcggcacggagtcttcgctaaccaactcgaccaccaaggactcggccaacggttcattgagcgccaccagcaaagcgccaaactcagcgatatgcaggggcagttggcgctgccagatggccaggttgacgccgtcattgaggatatcggacagcgccagcggcgtttccccatgtgtctggcggatgacggggcgcagggggatgaccggggccaacatcaggcgacctgctcataccaagggccaaacgggtcgggcagctggcgccaaccttcgacacccagggccatttcctcatcgttgagcaagcaggcgtccagctcggtacgcatctgggcaaagtcgatgttttgcccgataaacaccagttcctggcggcagtcaccggtactcaattgccagttggccatgatcgccgccacgctttcttcgtcctgcggccactggcttttcggcacaaagcgccaccaacgcccggcaaacccatgacgcatcaagccacccgcctgggaccaactgcccgcatcctgatgtttgctggccaaccagaagaaacctttggagcgcaacagcttgccgttgacccaggggcggtcgataaagtcgaaaaaccgctgtggatggaagggccggcgcgcacggtaagcggtggacgctatgccgtattcctcggtttccggcacatgctcaccgcgcaattcctgcaaccagcccggggcttgggcggcgcgctcaaagtcgaaacggccggtgttgaggatcttgttcagcggcacttcgcccatgaccatcgggatgatttccgcctgggcgttgaggcgctcgaggatggccatcagttcttcgcgttcgcggctgctgatcaggtcgatcttgctgatcaggatgacgtcggcgaattcgatctgttcgatcaacaggtcggtgatggaacgttcatcctcctcaccgagggtttcgccccgtgaagccaggctttcggcagcctggtagtcgagcaggaaattcataccgtcgaccacagtgaccatggtgtccaggcgtgcaatgtcggccaggctttgctcgttttcatcgcgaaacgtgaaggtttcggccacgggcaaaggttcggaaataccggtggattcgatcagcaggtaatcgaaacgaccttctttggcgagttttccaacctcttcaagcaagtcttcacgcaaggtgcagcaaatgcagccattgctcatctccaccagtttttcttccgaacgattgagcgtgacgtcgcgctgtacctcgctgccgtcgatgttgatttcgctcatgtcgttgacgatcaccgccacccgcaggttgtcgcggttgcgtaggacataattgagcaacgtgcttttaccggcgccgagaaagccggacaacacggtcacagggagacgattgggcatcaggtattcctcatcaaggttggccggtcaaactgcccgtttatggcgttcgcgcagctcttcacgttctttggcttcgatacacaaggtggcggtggggcgcagcagcaggcgttgcaggccgatgggttcgccggtttcacggcaccagccgtattcgccacgggccagcaactccagggcgtcgtcgatcttgtccaacagcttcttttcgcgttccagcaggcgcaattgccactggcgttgttcttcggcactgccgatatccgccaggtcgctgttggtttcctgctcgcgcagtgcctggaactcagcatcgatacgggcttgcaagtcatcgcgctgagccagcaacagttcgcggaaaaaacgctgctgggcctcgttcatgtagtcggccgctggttgggccaaaagatcgtgttcggtcatgggaagcggttcgcgggtcgggctgtgcttttatgttatagtataacaatacaaataagccaatccctcttgctcgccgcgacgaagggcgcaatgctgggtcacctgcctatgttgagaacctcgatgaaatacctgctgtgcgcgctgctattggcagtcgccgggcctgcctgcgcccaggcacccagcctgttggccaagtgcacacgcggcgccaacctgctggcgtgtgtggacccgttgggcaatgcctatagcgtggcgaccgtcggcagcaccacttacctgcgcggattcgaagtgatcggcaaacgctattgggcgcagaccaacagccggtatgggcaactgacgttctttaccgggctggcatcggatggcgaggcgtgggtcggctacacgcggcgcgtgggctggaccacccttaaccggttttccagctcagggggcgccagcgccaagttcacttgcagccgaatgaccggctgttagacctggctgtttttctgcgcctgcacccaggccatgtagctgttcatgggtgggttcttctgaaagtaacgtttgaggccttcgaaaagaccatccgccaccgcctgttgatgacgcaccgtcaccagccgctgggcgtcgcgcgcattggagatgaacccggtctccaccagaatcgagggtacgtccggtgacttgagcacggcgaacccggcctgctccacacgtttctgatgcaggctggtgatgttctgcaggctgcccaataccgagctgcccagttgcaggctggaggcgatggtcgcattcatcgacatgtcgagaatgaccccggccagcatcgggtccttgtccttcagattgagtaaggtggtggcgcccagcaagtcggcgccattttcgcgctgggccatgaaacgtgccgtagccgaagtagcgcccccttccgacaacgcatacaccgaggcgcccgacgcggtcagccgtggcgcggcgtcggcatgcactgagataaacatatcggccttgtgctgacgggcgatgtccacgcgcttgcgcagtggcacgaagaagtcgtcgttgcgcaccagttttacgtcaaaacccttttcgcgcttcaagcgtttagccaacaactgagcaatcgacagcaccacatctttttcgcgctggcccttggagccaatcgcacctgggtctttgccgccatggccggggtcgaccaccacgatgatgtcgcgcttgggatgcgccttgtctaccggcgtcaccaagggtgccggctctgcggcgatttgacggggcgcacgggtcgcgttggtcaaatccagcaccaggcgatggccttggccatcctggggcggcagcacgaagctgttgagctgcatgggctcgaccaggtccagcacgatgcgcgtatcgctcttgccgaaatgcccggaacggatcgaggtaatcccactgttcttcaacgccaattgggaaaagtcgccgctgagcccggctccactcaagtcgatgatcaagcggtccggtgaggtcagggaaaaggtcttgtattgcaccgggccgctgaggtcgaacaccaggcgcagcttatcgtccgagcgccacaggcgtgcattacgaatctgtgtggcgtaagcccccaaaggcaaggtgaacagagggctgaccagcagcaggttaaggagctgacgtctgtgcatgacatataccgcagataaaggagcgtccctactcgatatgactgaacaaaggctggagcagaaaattcatcgtagctcgtattgttatactataacatgtcgaattatttccaacgatggacctgcttatgaacgcgctgactctgccggatatcgccgcgcaggcttcacgccaagccttgccactcgactgggtggggatgtgcggcatcgccttgccgatcctgattgacggtcaacacctgaccgccaccgccgacgcgggtgtaagcctggacgacggcacggcccgtggcattcatatgtcacgcctgtacctggccctggaaatgcttgatcaacagccgctgacatcggcactgctgcgtaatgtactgcagcgttttctcgacacacatgaaggtttatctaagaacgcatacctgcgcatccacacccagctgctgcttaaacgccctgccctggtcagcccattagccggctggaagacctaccccgtgagcatcgaagcgcgcctggaaaaccagatgttccacgtggaactaaaaattgacgttacttattcctcaacctgcccttgctccgccgccctcgccaggcagttgattcagcagcaatttgtcgatgatttcgccaatacgccgttgcagcacgaagcggtgctggcctggcttggcagtgccaacggcatcgtcgccacaccccatagccaacgcagcagcgcgcagttgcacgttcagttgcaaggtactgacctgccgatagtcgacttgatcaacgctgccgaagccgcgctcggcaccgccgtacaaaccgcggtgaaacgcgcagacgaacaagccttcgccctggccaacgggcagaacctgatgttctgcgaagacgccgctcgccgcctacacctcgccttgaaacgctcggatgccatcaacgccttccacctcaaagtgatccacgccgaaagcctgcacgcgcacgatgccgtggctgaaagccgctggacgagagcttctgcatgatcacctgcaacgcgttgcgctggggtgcccccgggcaaccgctcaccccggcactgaatttgaccctgcaaaaaggcagcctcaccggcatcatcggcgccaacggcacgggcaagagcagcctgctcaaagtcatcgccggcctgcaaaagcctttggcgggaaaagtcatcgtggatgttccacgccgtggcggcctggccttcttgccccagcagcaacacttggaccgccagtttcctatcagcctgcaagaactggtggctgcaggtttttggggcacccaacacaccgctcaacaacgcagccaacgcctgcaagcggtgctggaagactggtgtctgattggcctggaacaccgccccttgatggcactgtccggcggcgaattgcagcgcgccctgctggcacgcatgagcctggccgaggcgccggttctgctactcgacgaacctcatgcagccctcgacgaggacggccaggcgctgtgctggcaacacatccatgcctggcacagcgaaggccgcaccctggtgatcgtctgccatgacctggcctccgtgcgtcaccacacccagcacgtactgcagatcaaaaacaccggctgcctatttggccccagcaaagagctgatccgcccgcaaccgcagatgcaggtggcctgaatgcacttcactgcccacttgtggctgccgtttcatgagttcgtttttatgcgccgcgcactcatcggcggtttggtgctcgcttgcagcaccgcgccgctgggggtgtttctgatcctgcggcgcatgagcctgatcggtgatgcggtagcccacggcatcctgcccggcgccgctctgggtttctggttcgccggcctgagcctgcccgcgctgaccctcggcggcctgggtgcgggactgagtatggccggcctggctgcgtggatcacccgccgcaccgggctgcgcgaagacgccagcctcgcggccatctaccccatttctctggccgccggcgtgctgatcctgggccttgccggcaagcgcctggacctgctgcacctgctgttcggctctgccctggccgtggatcaaaccaccctgaccggcatgctctgggtttcgggtttcagcctgatcgccatggcgctgatctacaaaccgctgctattggacaccctcgacccgctgttcctgcaaacggtcagccgcctcggccccctcgcccatggcgtattcctgaccctggtggtgctgaacctggtgatcggtttccaggccatcggcgcgctgatggtggtcggtttgatgatgttgccggccatcgcctcacgcttctggagtcgacgcctgccggtgttgatcgcagtatcggcgctgctgggctgcctgtcggtgtggttgggcttactgctgtcgttctactactcactgcccagtgggccggcaatcgtgctggtggcgggcgctgggtatttgttgtccgtggtgttcggtccggtgcacggtttgttgcgccgcccgcctttgctcacatcccaatgaggtgtttccccatgcgcgctctactcgtgctgttcagtctgctgctaccgctgtcgatggctcacgcggcagacaaactccaagtggtcaccagcttcagtattctcgatgacatcacccaccagatcggtggggagcatatccagatcagcaacatggtcggcccggacgccgatgctcatacctatgaacccacgccggatgacgccaaggcactgctcaaggccaaggtcatcatcaagaacggcctgggtttcgagccgtggctggaccgcctggtcaccagcaccgaaaccaaggcaacggtggtcaccgccagcaaaggcgtgatttcccacaccatggacgaggatggcgaaaccattcccgacccgcatgcctggcacaacctggccaatgccgagatctatgtgagcaacatcaccaaggccctggtggccgccgacccggcaaacaagaccgcctacctgcgcaacagccaggcctacctcaaacaaatccatagcctgctggaagaggccaaagccaagttcggcgccctgccaccgggtaaccgccgcatcgtcacctcccatgacgccttcggctacctgggccaggcctatggcatccagttcctcgcgccccagggcttgtccaccgaacgtgacccttcggctgctgaagttgccgcgctaatcacccagattcgcaaggacaaggtcaaagccgtgttcatggaaaacatcaaagactcacgcctgctcaagcagatcgctgacgaaagcggcgcacagatcggcggcacgctgtactccgacgccctcgccgcagaaggcccggccagcacctttctcgggctgttcgaatacaacctcaacaccctgtgcgccgcactgagccagccatgatccgcaaaaatccttccggcgacctgccggtgattgccgaatcggcctacgtcgacaagaccgcgatcatctgcggcaaagtcatcatcggcgagaacgtgttcgttggcccttacgccgtgatccgcgccgacgaagttgatgccagcggcgccatggacccgatcaccatcggcgccaactccaacatccaggacggcgtggtcatccactccaagtccggcgcagcggtgaccatcggcgaattcacctccattgctcaccgctccatcgtccacggcccctgtacggtgggcaaccgcgtgtttattggcttcaacagcgtgctgttcaattgcgccgtgggcgatggatgcgtggtgcgccacaactcggtggtcgacggccgcgacctgcccgccgcgttctacgtgccctccacgacgcgtatcggccccaacacggatctgtcgcagtttccgccggtgagtgtcagcgcctcggagttttccgaagacgtggcacgcaccaacgtcgacctggtacgcggctacaaagccctgcaaaacgagttctgaaccatgagccgcctgctgatccgcaacgcccgcctggtcaacgaaggccaggtattcgacgccgacgtactgatcgccaatggccgtatcgagaagattgccaccagcattcaaggcgataacgaaccagtggaaatcgatgccaacggccagtggctgctgccagggatgatcgacgaccaagtgcattttcgcgaacccggcgctccggaaaaaggcagcttctacagcgagtcccgcgcggcggtggccggtggcataaccagcttcatggacatgcccaacactcacccggccactttgagcctggaagccctggccgataaaaagcgccgtgcggcactgcactcagtggccaactacggctttcactttggcgtgagcaacgacaacctcgacaccgtcgccgccctcgccccccgtgaagtggctggggtcaaagtgttcatgggcgcctctaccggcaatatgctggtggacgacccgcgcattctgaagcgtctgtttgccgaggtgccaaccatcctgctcgctcactgcgaacacacacccagcatcctcgccaacgagcaacgcctgcgcgagcgcttcggcgagcatattcccgccgtggctcatccgctgatccgcgatgccgaggcctgttatcgctcgtcatcgtttgccgtggaattggccaaacgccatggcacgcgcctgcatgtgttgcacctgaccagcgctcgcgaactggcgctattcgaagacaagcccctggccgacaagcacatcaccgccgaggtctgcctgcaccacctgctgttcgatgaccgtgattaccaccgcctcggccaccagatcaaatgcaacccggcaatcaagacccgcgccgaccgcgacgcgctgcgcctggcgttattgagtgatcgtctggatgtgattggcagtgatcatgcgccgcacacctgggcgcaaaaacagttgggctatcgtgacgcaccgtcagggctgcccctggtgcagcatgccttgccggcgttactggaattggtggccgacgggcatttgcccctcaccacattggtcgccaagaccagccaccgcgtggccgacctgtttgccattgctgatcgcggctacgtgcgtgaaggctattgggccgacctggtactgatcaaaccggagcctgccggcaagccggtcagcagccaaccggttctcgcccgctgcggttggacgccctttgcagagcgcagctttcgccacagcgtgagtacaacgttggtcagcggccacctggcctggcacaacggccaggtggtcaacagttgccagggcttgcccctgcagtttgggcgttaagcgcggggtttgaccgtaccgcaatcgttgcccagccactgggcatggctatccaggctacctttttgctggataccggtggcattgaacgtaccgttgacgctggtggtaaattctttctggctctggaacgttgctaccccagtaccctgggctttcgggcaactgaagcgaaatttccactggttgccgctcttgtcggtgacttcctgcttgcagcccgattgagggtcagtcagtgggatcgagtcggaggcaacctgggccggggtcaggcacacctgcacgcctttaccggccatgttgatgccttgcttttcgagcatggcgcgctgttcaggggtcatctgttgcttgagctgaccgaggatcagcgacaagtccggcaggtcctggttatcgactttcatattgctggtggtcaattcccacaagcccggcgccagcatctgcgcctgcgccgccacaggcagcgacaaaccaacaaccatggccaaaccaagcagacgagcattcatcgggtaactcctgggtaattgtgggcgttagacgtcgcaaagcagccagtgttgcatggcaaataaaatagcgacattcacagccgttcatggtctgttacgcactggactgcctggagttacgtcgttcatggatttctttggcccgcacctgctcgcctacgtcattgccacgctgcactttctgggaacgctcgccgcgatccacgcagtactgaccgtgcgcaccgcacaaggctcgatcgcctgggcgttgtcactgatgttcatgccctacctgacgttgatcccctacctgatttttggccgcagcaccttcgacgcgtacatccaggcccgtcgccaggccaaccaggaaatgcacacggccatcaccgagttgaactggcgcccgtgggtggaggaagcgctcgcagcgcgcaactccagcgcctatgcctccttgcgcgccatgcccaagctgggccgtatgccgtgcctggccaacaatgaagtgcgcctgttgatcaatggcgatgccactttcggcgcgatcttcgaggctatccgtcacgcaaagaccgccgtgctgttccagtttttcatcattcacgatgacgaactgggccgccagttacaggccttgttgaaggcaaaagccgcccagggcgtagccatttacgtgctctacgaccgcatcggcagtcacgccctgccccatcgttatgtgcaagcgctgcgtgacgctggcgtgcaggtcaaggcgttcgccacccgcagtggatggctcaatcgcttccaggtcaacttccgtaaccatcgcaagatcgtcgtggtggacggcatcaccgggtttgtcggcgggcataacgtaggcgatgaatacctgggtaaaaaaccgccgctggcgccatggcgcgatacccatgtgcaggtcaccggcccagtggtggcgtgcctgcaggagtcgtttgccgaggactggttctgggccgcccgggaactgccgccgctgatcctgccggacacctacccggaggacggcgtgctctgccaattgctcgccagcgggccagcggacccttatgaaacctgctcgctgtttttcgtcgaggccatccacgccgcgaccgagcgggtgtggatcaccagcccctacttcattcccgacgaggcggtgtttgccgccctgcgcctggcggtgttacgcggggtagatgtgcgcctgctgctgccgtcacggcccgaccatcgcatcgtgtacgccgcatccagcctgtatgccaacgaagcggtgcgagcgggcgtgcgggtgtttcgctacacgccaggctttttgcatcagaaggtggtgttggtggacagcgaaatcagcgccattggcagcgccaacatggacaaccgttcgttccggctgaattttgaggtaatgctgctgacggtggatgaagccttcgccagccaggttgaacagatgttgctggatgactttgccctggcccatgaagtcagccaggaagaaagccgcgagacccgtcgcctgcagcaactggggatgcgcgtggcgcgcttgatctcacccatcctttgacagacaacacacaacccatgtgggagctggcttgcctgcgatggcggtgtgtcagtcgactcatccggtcctgatacaacgctatcgcaggcaagccagctcccacagtttcgatcttcagtgtctggagatcagcggtagagatcttcccgcgtccacggcagttcatgcccgccatcggcatggggttttaccgccaatatctggtgcaggttgatccagccacgggcaaacgcgtaagcgcaaccggccaggtacagccgccagatacgtagcgcctgctcaggcaccatcttcgccgccgcttccaggttgtcttccaggcgttcgctccaatggtccaatgtgcgggcgtaatgcatacgcaggctttcgacatcgaccacttccagccccgcttcgctgatctgggcggtcatcatcgccaagtgcggcagttcgccgttcgggaacacgtagcgctcgataaactcaccagcgccacggcccacggggcggccgtcggtgtgcttggcggtgatgccatggttcatcaccaggccgccttcacgcactgcgccgaacaaggtccggcagtattgcgccaggttggcgtggccgacgtgttcgaacatgcccacgcttaccactttgtcgaaacgaccgtcctggggcaggtcgcggtaatcgagtaattgcaggtcgacctggtcttgcaggccttcggcgttcacccgctccttggccagggccagttgttccttgctcaaggtgataccgaacacttttaccccgaactcccgcgcggcatagcgcgccagcccgccccagccacagcccacatcgagcagatactcacctggctgcagccgcaacttgcggcacaggtggcggaatttgtcttgttgggcttggtcgatcgactcgctgccggtttcaaaataaccgcaggagtacgccatgtcctggtccagccacagctggtagaactcgttggataggtcgtaatggtaggaaatggccgcggcgtcggtggccttgtcgtgaatcgagcgcaccggacgactcccctcgtcgtcatcgaccaaagcgtgactcaactcgtcacataccctgatcacttcggtgatggagccttccagctccagcttgccctcgacgaaggcttcgccgagtgagtcgagcgttggatgggtcagcctggagacaaccgtggggtccttgaccacgatggtgacactgggctcagggcccaagttgaattcatggccgtcccagagtcgaagacgcagcggtagctgaagattctgtaaggccggtggaagttgcgcgagcatgagtagtccccccttgtttcagacgtctgctgtgagggtagaccatgccaaacaaagtaggaagctatcgaatgaataacctccttctatggcgctcggcgctcgagcaaaccttcctggacccactgtttcagccaaatggccgcttgcagcgacgccccctctgaataagtgaccgccagctcagtacacagttctgaaaaattccagcccatggtcaccatgcccgacagcgcacaggcttcagcggcttccaggctgcggtagtggcagcggttctggttgcgccacaccaggcagatttgcgccggttccagcgtctggctgccggggaaatccgactcatccttgctggctcgccagatcgccaccgtgttgaaacggcaaagcagttgctgcaccgaaggcgccagcgcaacctgcaaggtgggccagtcttcaggcgccaggtgcgccatgtcattcaaggtcagcagctccccttcgacggcgtcaaacgccaaggtgaacgcccactccaggcgtgccaactcagccaaaggcgcactttgcgcagccatcagatgctcaacgataaacatcgcaaagcgctcgcccaaccagcgcacgctgtaatgggccgagggataacggcggatgtaggcctcggtcagtgagcaaaactcctcatctcccagccaataccagatggcaccgaagtcatggcgcagcacttcttgcagacgcgacaggtaagcgttgtggtaaatcgccaggccggtgtctacatccaatgtcggccctcccagcaaggtggcggcaaagccactgttggccgcgggtgcttcggataatagatgctgctcaaacgccaactgccagtcgatcaggcgcataacgctctccgggccaaggcgctggcacccaactcacgggctttgttcaactcggtgagcaactcttcgaagggcggaaaatggtcatcgcgttccagcaacgtcgacaccgggcccaaatgctccagagtttgctgatacagcgcccacaccgggtcgcacacgggatggtcatgggtatcgaccacatagtcgccatagtccatatgccccgccaaatgcagctggcgaatgctttcgggtggcaggttgcgaatgaaggtccaggcatcaaaaccatggttacgtgcgctgacgtagacgttgttgacgtccagcagcaactggcagccgctcaggtgggccaaggcgttgaggaactcccactcggtgaattcatccgccttggaacgcacatagctggagacattttccagcaccagcggacgctgcaacacgtcctgcacctgacgtacacggccggccacgtggtaaaggctttcttcggtgtaaggcaggggcaacaagtcatgtagctggtgcgcactaccgcggctccagcacaggtgatcggaaatccacgccggctgaatgcgctctgcgagctgtttgatgtggttcaggtaatcggtatcgagggcatgcggcccgccgatggacaacgacacaccgtgcatcaccaaggggtaacgctcggctatcgcatccaggtagtacaaggccttgccgccctgtaccaagtaattttcggagatcacttcgaaccaatccacggccggcgactgttcaaggatctggtggtagtactcactgcgcaaacccaggccgtaacccagacttggaagggacgcggacatgactcactcctgggcaaagtgtccgcagcggtggcaggcagccgccgcggttgcactcgtgtgccggttactcgccgactttaccgccagcggcgtcacaggccgacttggtcatggccttgaagcccatccctttgcactcgccctggcccttgcacgcgtggtccttggttttgcaatcgttcatgcctttgcaggaggtcacgccgtagcagtgcacggtggcgtctgcggcttgtacctgagtggccacacccgcgaacagagaagcagcggccattgcgagggcggcaccagcagcagcggatttaatgctcattgttgtattcctcatgatcagtagtggagccggtctgaacggattgttcagtctcgacacagcactagagtgaggccccctgtcggcgttacagccgtgagcaaatatttctgaaattattcctcaagctttaacagcggctcctggaagcgcagcaaacgcccggcattacccaacaccagcaaggtactgaggttatgcagcaccgccgcgatcatcgcgcccgccgcccccaaccagccaaatgcggcgaataccacaatggccagcgtccagcccaagccaatgatcacattgacctgcaacgtctgccgacactggcggctcaagcgcacacaggtgcccaggcggcgcaaatcgctgccgatcagcaccacgtccgccgaggccagggcgatgtccgcaccgcccgcgcccatggccacaccgaccacaccggccttgagcgccagggagtcgttgatgccatcgcccaccaccattggcctgaagccactgctgatttcgcccagcacgcggttgagcttgtcttccggcagcgcttgggcttcgacatcactgatgcccacgtccagcgccaggctgtcggccacgctttggcgatcgccggtcagcagcagttggcggcccaggcccaagtcacgcagctcttgcagggcctggcgcgcttcgggtttgacgctgtcggccaacagcagccaggcgaggaactcgccgttcaacgccagcccggcaatcgggccatcatgggtgggtacggcggtggtgacgatgcccaactgttcaaataactccggccgtcccagcgccgcttcgccctgctcggtctgggcaaccacgcccaggccctgacgctcgcggatgtcgctaagaacaagcatctgctcctggctcgccaaccccgccaacgctcggctgaccgggtgactgctcgccgaaccgaggctggccgccaggttcagcagcgcttggcgatccggcacgcgggtctcgatggactgcaagcgcagggtgccaaaggtcagggtgccggtcttgtcgaccaccagtgaagtcaggtcggccagctcttcgaggaacgccgagctgcgaatcaggatgccatggcgcgccgccacggcaatcccggcaatcgccgtggccggtgccgacagcaccaaggcacaggggcacgccgctaccagtaccgcgagcatcgcctgggcgtcattggtgacaaaccaggtgacggccgccagcagcaacaccagcaccatgtagctgccggcatagcgctccaacagccgggtgatcggcggcttggaccgctcggcgttctgcatcagcgcaatgactttgcccaacgtcgattcgttaccggtgcgcgtgacctcaagacgcagcaggccatcaaggttgatcgccccaccaaacacctgcacgcccacgctggcttccaacggcaccgactcgccggtgatcggcgccgtgtccaggctcgcctggccggacaacaccacgccatcggccggcacgcggtcgccggcgcgcacttcgacgatatcgccggtgttcaaggtgccgttatccacttcggtgatgctgccgtctgcctgcaccaggcgtgcgtggctgcgggtgagtttgcccagggcatggatcgcttcctgggagccaatcacgctgcgctcttccagcacatgcccaaagatcatgatgatcggcagcaacgcggcggtgagcagatcgcccgtggcccaggcgccgagcatggccagggcgatcaattggtcggtgatgccgtgcaggcttggaaagcgcaggctgtaccaggctgaacgcatcaccggcaccgccaccaacagcgaagccacgcccagcagcaactggctgacgccgctctgggccggcgcgagccagcgccacaccaggcccagcacgagcaagcccagggcgagcatcgccaaggtcaattgccgggcagcgctgcgctgttcggcggaggtcagcatgggtgcgctcattgttcggctccctggatgatcaagcgggagtcgtctttgggatcgacggtggttaccgaaccggcctggccgagaatcttcggcaggcgttcacggtacagacgcaacagcaaaccggggtctttgacctgggcgaggctggcaacggtagcggtttgcgcctgtgcattggccaagcgctcgctggcctgggcatgggcgacttgcacctggcggtcagcctcttggttggcggtctgggtaagtttttccgcttcagtgcgggcgttggccacggctttatcggcttgctggctggcggtcagtacggcgttgaacgcgttcaccgcaggccctggcaggctcgattgcacatcgacgcgggtggcttcgatacccagccccaagccgctggccgccaactccgccaggcgtttattaatgccttgcaccaggtcgccgcgcagccgctcacggcgttcggcggcgccattatcgctgccgatcagttccgggcgggctaccaggatggtgtccagatcccgcgcagcggtgagggccacggcgctgcgtgtcaccagccgatccagggccggcagcacgtggtcgccctgcaacacaaaggcgtagggttcggtcaccttgtagaacacccgtacgtccaactgcaccaccccggcatcgccggtcagcaggtagccggaaccggccagggcatcgctcaagggcgtggcgaaactggccacccgatcggcctgcaatgccgcatcggaacgcagcaggttttctacccggcgttcgatcacccggtcggccgctggcaacaggacgacttgttcgaagggttgcggccaggccagcaacaatccggcgttctgaatgcgatcaagggcgccgaagtgcaagaccacggcgcgattctgcgggtcgatctggcgcacattggaaaaggcccaggccaacgccgccaatacggtgaccgcgtacagtgccaggaacgtcaggcgcccggcctggatccacgggctgtccgggctttcaggctcgctcatggctgcaggtccttgggcccgtccaccaaggcgcggaacggcgcggcgtcggtgcgcaggatgatcttggtccccggcgtgaccaccgtgcccaaggtatccagcgagcgcagcaggttgtacagctgcggattgccagcgtaggcacgaccataaatctgcgcggcttcgacacgcgactgcgcttcgatatcagcggctttcacagtggcatcggcctgcatgatgcgcgcatcacgttcggcagcggagcggatctgcgcggcttcgcgcttgcccacggcagtgcgttcggtggcgatggtttcacgctcggcgcgcatgcggtcaaccgtggcggtgagggtcaccgatggcaacgtcaagcgctcgatgccgacctgcgccacgcgcacgccgtaggtggtgagcaattgttgatcaatctgctggcgcaactgcgcttcaaaatcggcaatgcgcacttggctggcgtcggtattgatcaagctggacaggtcaaaactggccgccgtggtttccaacgccgagccgacgaaggtacgaatctgccgcgccgcctcatcaggctggttctgcaccgcacgcataaaacgctgcacgttgtcggcatcgccctgcacctgccacgccacataggcctgcacaataatccgcaagccatcgcgggtgcccacatcctgcaggccgctggaggtggtgcgcagacgcaggtccaccgggatcgccgcttcgaacggtgccggccagcgccaacccaggcccggttccagcaacacacgcgcggggttgccgaagcgggtaatcaccgtggcctcgccggaacgcacttgcaccaggctcgccgctgccacggcaaacagcaccagcaacgccgcccacgccatgcgacgccagggaaaaggcccggccgcctgctcatcgccgtgatggtgatggtggtggccgtgatggtggtgatgaccgtgatcatgatcgtgggaatgagcgctcaacagacgaactccttattgaacggctttgcgcggcgccgacgggtcggcgggcaaggtaaaagaacgcagatcgatcgtcggcgcgctgtcggcgcccaaacgatgatccagaataagcagcttggcctgggccaggccctggctcagttggcccaggtactgttccagcacgaaggcttggcccgcagcggcgtaggccttttgttcggcggcaaagcgcaggttcgctgcttgggcgccggcattcacttcgcgggcactggcctgggcctgatcgcgagcagtgctggcttgcagcagcgcctggttggtctgttcgctggcgacaccgcgttcacgggcgatcagcgcctgggcgccgatctgcgcggcttgcacaccgtggtaagcgttagcggcaccggccggcgggtggatcgcctcgaccaccgtggcgaggatttccacaccgctgtcgagggtttgcaggtcggcttgcacactgcggccaatctcgtcggcgaggctggtgcgctcttccccgagtaattcatccagggtgcgcgacgcgaaatcgtgcaccaggatgcggctggcggtgctgcggatcagggtcgggatatccgcgctgttgtaggtggcggcaagcgcagcctgatcggtgaggccgatgcggtagacaaagcgcacgtccatattgacgatctggaagccctgcttgccgccgctgctgctggcaatgacctgggatttgtcattcacatggctggcgtcccacaggcggttggcgatcaacggcgccgggccttcggctgcggccagctccggtgtggcggcgtcactgacgctggtcgccagctcatgcaccacgccgttttcaacattcagtacgcggcccaacggccacggtaagcccgcatgcaacccggggccgaacacctcgaccggtttaccaaagcgctcataaatcccacggccttgcaggggcacttcatgcacaccggtcagcgcccaacctaccgccagcaccaccagcaacaccgggaaaaacgctcggcgcatgtaggtaaaggcccagatctggcgcaggtcgatgccaaagcggttgtgcagttcatgctgcaacgccagcaagggctgaggcggccaacgcagtaggccggcgataaaactctgcgccatcaagcgcggttcgaggcgcggctggcgcgggctgaacagcgagagcacgcccctgagcaggaactccagcgccaccaacgccggcaacagcccgatgagagtggccaggcgcaacggccagaccgactccgcattggcaaacagcaggcagatcgcgctgagcaccaggcaaataattgccatccggctcaactgcgccaactgtgaggcttccggccattgggcagcggtttcctgggccaaacggcgttcgaataccaacaggccaaacgccagggccaatgcgagcgctgcgccaatacttgccgactgcccgatggcggcagcgggcaagcccaagttccagaactgcaggatgctgaccagcgccaacagcgaccagccgcccaaccacagcaccggcgcgccaatctgcgccaacaggccgttgccgaaccggttgatcaggcccttgtgccaaggagtgggctcgctgagaggttcgatcaactcgccgctcggcgcttccagagcctgggcacgccaatcggccacccaccaggccgactgcaacccggccaccagcagcagcaaggccgacgcgcagttgatcaataccaccggccagatcgacagcggtgcaaacaacgctacgaacagcgccaatatccaaccgctgagggccagggtcgtcaggccgataccggcctggcgcaatcgacgggcgtggaacagcccctgctgaaaacgcgcgaggccttcaaccgaagccccgtcagcctctagatccacttgcatctgctcaacgcccacttgtacacaattcgttacgatataacacgaagcgtgaaatttttgttcgaaaccccggtaggagcgagcttgctcgcgaaaaacctcaacgataacgcgggcatcctgaatatatgcggcgcttgtgagtttttcgcgagcaagctcgctcctacattggcccctaatcgtgctgagagtgtgactaaccccctataaacacgagccatcactggtgtcggctgcgattagtcggcacacttcagaacagtttttcgcgggttcacggacaaggaagcgccaccccccatgatttccatctaccaactcaaaccgcgttttcaaaacctgctgcgccctctcgtgcagcgcctctatgacaacggcaccaccgccaaccagatcaccgtactggccggggttgtttccctgctggtggggctgttgatcgcgggctttgcccaacacctctggctgtttgcgctgatcccgctgtggatgattgtacgcatggccctcaatgccattgacggcatgctcgcccgggaatttggccaacagtcgcgcctcggtgcttatctcaatgaactgtgcgatgtgatcgccgacagcgcgctgatcctgccctttgcattgatccccgaggtgagcctggcgccggtgctgctggtgacgctgctggcggtattcagcgagtacgccggggtgctggggccgatggtgggcgcgtcgcgccgttatgacgggcccatgggcaagagtgatcgggcgttcgtactcggcgtgttggccacgggcgtggcgctgggctggctcggcgccggttgggtggaggtggtgatgtggctggtggccgccctgctcgcctataccttggtcaaccgagtgcgtcagggcctcaaagaacaacaaacttccccttctgcataaggattttgcgatgcgcgaacagcaacagcacaccttcagtacccatgatggcgtcgagcttttctaccggcactggccggccacggcaggcgccgggccgcgcaaggcgatcctgttgttccatcgcggccatgagcactcagggcgcattgcccacctggtggatgagctgggcctgcctgaattcgacttcttcgcctgggacgcccgtggccacggccaatcccctggcgagcgcggcgacagccccagctttgccaccagcgcccgcgacgtgcagactttctgtgaccacatcaatgccacctacggcatcgaagaggaagacatcgccgtcatcgcccaaagcgtcggcgcggtgatcgcggccacctgggttcatgattacgcgccaaaaatccgcgttctggtgctcgcctcgcccgccttcaaggtcaagctgtacgtgcccttcgcccgccccggcctggccttgatgcgcaagttcaagggcaactttttcgtcaacagctacgtcaaggccaagttcctcagccatgacccggaacgtgtggcgtcctacgacaacgatccgctgatcaccaaggccatttcagtgaatgtgctgttgggcctgtacgaagcggccgaccgggttgtcgccgacgcccaggcgatccaggtgccgacccaactgcttatttcgggctccgactttgtggtgcaccgtaaaccccagcagcagtttttcgaccgcctcggcagcctgaaaaaagagctgcatatcctccctgggtttttccacgacaccctcggtgaacgcgaccgagccgtggccgtgagcagcgccaaacgctttattttgcagaacttcgcacacccgctggaccgcgcctctctactggacgccgacaaacttggcgccacgtgcgccgaatccgaatccctcgccgcgccgttgccacgcaattccctgcgcgacctgtactggcgcatgacccgcgccagcatgggcctgggtaaaaacctgtcggatggggtgaagctgggcttcgacaccggcttcgattccggcagcaccctggactacgtgtatcgcaataagcctaccggcaagggcgggctggggcggatgatcgataccaactacctcaattccattggctggcgcggtattcgccagcgcaagttgaacgtcgaggagttactgcgcctggccatggccaagctgcgtgatgaccaacgcgaagtgcgcattgtcgacatcgccgccggccacggccgctacatcctggaagccttgcaaggcgtatcgccgctgccggaatcgatcctgctgcgcgactacagcgacatcaacgtgcgcgacggtggcgcgctgattcgcgagaagggcctgggggacatcgcccacttcgtcaaaggcgatgcgttcgaccgcgctgacctggctgccctggaccccaagccgacactggccgtggtgtccggcctgtacgaattgtttgccgataacgccatggtcggcggctcgctggcgggcctggccgaagctgtggagccaggtggttacctggtctacaccggccaaccgtggcacccacaattggagctgattgcccgcgcgctcaccagccaccgtcagggccaggcttgggtaatgcgccggcgtagccaggcggaaatggaccaactcgtcgaagcggcgggctttcgcaaggtcacccagcgcgtggatgagtggggcattttcaccgtgtccctggcacagaagatctgaacatgcgcgaacccggtttattgaaacctgcggtgctctggctactgctgttggcaccgctgtttttcagcacctacggctttgccacctgggtcaccagccagcgcagtgacgtcggtacgctggtgttcggctgggaaagccacatgccgttctgggcctggaccatcgtgccctattggtccatcgacctgctttacggcttctccctgctgctgcccactacacgccatgagctcaaacagcatgcgctgcgcctgctgagtgcgcaggtgattgccgtgagttgctttctgatctggccactgcgcttcacgtttgagcggccggaactggacggtgtgttcggttggttgtttgcggtgctggccggttttgacaagcccttcaaccaggcgccttcgctgcatatcgcgctgctggtgatcttgtgggtgatgtaccagcggcacactcaaggattgtggcgttggctggtgcatggctggttcgcgctgatcggcgtttcggtgctgaccacttatcaacatcactttatcgacttacccacaggcgccctcgcgggatggctgtgcgtgtggttatggccggtagaacacccaagcccattgttaagtgcgcggttgacgcgagatacccaacgttgtcgcctggctgtgcgctatgggctgggcgcgctattactgctggcgcttgccttggtactgggcggcggctggctgtggctgctgtggccagcggtttccctgggtttgatcgcggccaactaccttttgatcggcgtgtcgggctttcaaaaacgtgcggatggccgccttacacctgccgcccgatggttgtatgcgccttatttggcgtgtgcgtggatcaattcgcggctgtggacacgcaaacatccacagccggacctgattgtggataacgtctggcttgggcgcattcctacaaccggtgaacagcgctcattcgcgagcatcgtcgacttatgcgccgaactgccgatggatccacaaggccgtgcttacgtctgcgtgcccgtgctggacctgatcgccccaacccccgacgaatgcctgaacgccgcccacgccattgaacgcctgcgagcgagcggcccgctgttggtgtgttgtgccctcggttactcacgcagcgccaccgccgtcgccgcctggctgctgaacacggggcgcgccgccacggttgagcaagcgctggctattattcgtacagcgcgggccgatgtggtcctgcaccccgcacaccgtcaagcgttggagggtttgccaaatgcctgctgatatggaacttcaggtcgtcgccagcctgttgcgccgtggccgatcattggatctgttatccacagggctgacgctgctcggtgtgctgttcggcctcgcccagttgttgctggccagtatttccaccatttgcttgctgttggccctgtggatgattgtgctgggcctgttgcaaaaatattgggcgctgcgggtggcctttgacgccgacctgttcgccctgctcgctcgcgacaccacccgcacgccagacctcgaccaggccctgcaaacccttggcctgcaatcgcccaaacgagtcggtcgcccctggactgaacgccgtcgtggcgccctcaaactgttgcgtaaacaagcctggctgctgggcgcgcaagcgctgctgaccttgggcgtcatcctcgccagcccttggctacctttcgccggataaggaattcccatgttcgaacccgtggtcgccacgctgattacttccatggcccgcaccgtcaccggcgcccgcagcctgtggctggggtgcgcgccggtaccggtgcagcgcatctattttgccaaccacagcagccacggtgacttcgtgctggtatgggcatcgctgccgcagaacctgcgcaaattcacgcgcccggtggccggcagtgattactggaacaagagtgcgctgcgccgctacatcatcaatcgagtgttcaatggcgtgctgatcgaccgtgagcgcaaggaccctgtggataaccctctgcagcccatgcttgcggcgttggagggcggcgactcgctgatcattttccccgaaggcacgcgcaatctggaggatggcttgctgcccttcaaaagcggcttgtatcacttggcaaagagttacccacaggccgagctggtccccgtgtggatagccaacctgaaccgggtcatgcccaagggtcgcgtattgccactgccattgctatgcaccaccagcttcggtgcccccctgcagctggaagaaggcgaagacaaagccgccttccttgcccgcagccgcgacgccctgctcgcccttgccccggagcattcctgagatggatagccaaaccctgatgttatttggcggcatcggcgcgatcctggtcatcgcctcgctgatcggcctgatcctcaagctgcgcacccgtggcagcccgaatgccgtgatcgataacctcaacgcccgcatcaacgcctggtgggtcatggtggtagtgatcggcgtcgccttctggctcggcaccggcgcggtaatcctgttgttctacgccgtgtcgttctacgccctgcgcgaattcctcaccctcacgcccacccggcgcagcgactacccggccctggtggccgcgttttacctggccctgccgctgcaatacctgctgatctacgccgactggtatgggctgttctcgatcttcatcccggtgtacgtgttcctgctgctgccgatcctcgcatccttaggcggcgacagtacgcacttcctggaacgtgcatcgaaggtgcaatgggggttgatgatcgcggtgttctgcgtgtctttcgtaccggcgctgctgacgttggacatccccggctacgaaggccgcaacctgctgctgatcgcctatttagtgatcgtggtgcaactgtcggacgtattgcagtacgtgtgcggcaagctgttcggcaaacgcaagatcgcgcccaacctgtcgccgtcgaaaaccgtggaagggtttgtgggcgggatcctgctgtcctccttgatcggcgcggcgttgtggtggaccacaccgttcaatccctggcagtcattcttgatcgccctactgatcaacttgctggggtttgccggcgggatcgtgatgtcagcgatcaagcgtgaccgcggtgtgaaggactgggggcacatgatcgaaggacacggcgggatgttggatcggctggattcagtgtgctttgcggcgccgatctttttccatcttgtgcggtattggtggacttgacccaccccttttacaaatccgatggagatccaaatgtgggagctggcttgactgcgaaagcggtggtgcagtaacagatgcagcgactgaaacgccgccttcgcgggcaagcccgctcccacaggggatatgcgcttacctgtaggttttgtggtgctttcaggacctctagccagcgatctcgacatagctggactcaccgccgcctgtcgcacccgatagccagccccaaacgaaactcagcgttgtgcgcccggcgtgatccacacctaccgtgcctcgtgaccaccccgccagcagttcgccgtccagggttacgcactgataaagcagctcgatggtatctgcaccggtcacccgcccgacctgcgttcccaggcgaattcggccaccctggtaagtgctggaaatcacgccatcttcgacctggtaatgaaacacggtgccggtaccggacaacccttgggcgttattcgcgaccacgaaccgacgattgtgcaaacgtgcctggacagtcgcagaagagctttgcatcagtacgcatccttgaattaatcgaatccaaaacgaaaaaaggggctgttaaacacagccccttttgggtacatcagtaaggcttactccaccgtcaccgacttcgccaggttacgcggctggtccacgtcggtgcccttgagcacggcgacgtagtacgacagcaactgcagcgggatggtgtagaggatcggcgacagggtgtcgtggatgtgcggcatgttgatgacgtgggtgccttcaccgttggtcatgccggccttctcatcggcgaagacgatcagttggccgccacgggcgcgtacttcctgcaggttggacttgagcttctccagcaattcgttgttcggcgccacggtaaccaccggcatgtcgtcatccaccagggccagcgggccgtgcttcagctcaccggcagggtaggcttcggcgtggatgtacgagatttccttgagtttcagcgagccttccatcgccaccgggtactgcgcaccacggcccaggaacagggtgtggttcttgtcggcgaaaagctcggcgactttttccacggtgctgtccatggccaaggcttcgcccaggcgggtcggcaggcggcgcagttcttccaccagggtggcttcgacaccttcagcgagggtgccgcgcacttggcccagggacagggtcagcagcaacaggcccaccagttgggtggtgaaggctttagtggaggcgacgccgatttcacgaccggcctgggtcagcagggtcaggtcggattcacgcaccagggagctgatgctgacgttgcagatcgccaggctgccgaggaaacccagttccttggcattgcgcagggcggccagggtgtcggcggtttcaccagactgggaaatggtcacgaacagggtgtcgggttgcaccaccactttgcggtagcggaactcgctggcgacttcgacctggcacgggatgccggccagttcttccaaccagtaacgcgccaccataccggcgtggtagctggtgccacaggcgacgatctgcacattgcgcactttggcgaacagttcggcggcttgcgggccgaaggcgttgaccagcacctggttctggctcaggcgaccttccagggtgcgctgcaccacggacggctgctcgtggatttccttgagcatgaagtggcggaactcgcctttatcagcggcttcggcgccatcgcggtactgcacggcttcgcgctcgacagactgaccgttcacgtcccagatctgcacgctttcacggcggatgtcggcaatatcgccttcttccaggtacatgaagcggtcggtcacctggcgcagggccagttggtcggaggcgaggaagttctcacccaggcccaggccgattaccaatgggctaccgctgcgggctgccacgacgcggtcaggctggctggcgctgatcacggccaggccgtaggcgccgtgcagctccttgaccgtggccttgagggcggtggtcaggtcgctgtggtccttgagcttgtggttgagcaggtgggcgatcacttcggtgtcggtgtccgaggtgaaaacgtagcccagccccttgagttgttcacgcagcacttcgtggttttcgatgatgccgttgtgcaccaccgccaggtcgccggaaaagtgcgggtgagcgttacgctcgcacggtgcaccgtgggtggcccaacgggtgtgggcgatgcctaagcgacctaccagcggctcaccggccagggcctggtccaactcgctgaccttgcccgggcggcgcatgcgctccagcttgccggcgttggtgaagacggccacaccggcgctgtcgtagccgcggtattcgaggcgcttgaggccttcgatcaagatggcagtaacgttacgttcggcgactgcgccaacaattccacacatggtgcttctcctagatgattgccgcgcatatcagcgtaatgccgcgggcttggatctggtcgcgggcctcaagcggcaggcgatcatcggtaataagggtatggacgctgctccagggcagttccaggttgggaatcttgcggccgatcttgtcggattcgaccatcaccaccacttcacgggcgacctcggccatcacacggctcaaacccagcagctcgttgaaggtggtggtgccgcgctgcagatcaatgccatcggcaccgatgaacagctgatcaaagtcataggaacgcaggacctgctcggcgacctggccctggaacgaatccgaatgcgggtcccaagtgccgccggtcatcaacagcaccggctcgtgttccaattcgctcaaggcgcgggccacgttcagggagttggtcatcaccaccaggcccggttgatggcccagttcgggaatcatcgcggcagtggtgctgccgctgtcgatgatgatgcgcgcatgctcacgcaaacgcttcaccgccgcacgggcaatggcgcgcttgtaggccgagatcggctgggcagcgtcgcccaccagctcttgtggcatggtgattgcgccgccatagcgacgcaggagcaggccgttactttcgagggcggcaaggtccttgcggatggtcacttccgaagtttcgaaatgtttggccaattcgtccacgctgacttcgccctgttcgttgagcaaggtcaggatgttgtggcgtcgttggggggtatttcgtttcgacatggtagtgataagtttcgtttcgaaagataacgaaggcaatcaaaacctattggcgaaagatcgtcaagcggggcatgcaatatttttaagtcaccacaaatcaattgtgggagctggcttgcctgcgatagcggtttgtcaggcgacatccatgctgaatgtcagaccgctatcgcaggcaagccagctcccacaggagtgcgccccaatctatcgaattgtggataactcagttctttttgattttgaccgggcgtttccagccgtcgatgttgcgttggcgagcacgagcaacagccagttgggacttatccacatcctggttaatagtcgagcccgcggcggtgttggaaccatcgccaatggtcactggagcaaccagcgagttattggagccgatgaacacgtcttcaccaatggtggtctggtacttgttggcaccgtcgtagttgcaggtgatggtgccggcaccgatgttggtgcgggcgccgatgacggcatcgcccaggtaagtcaggtggccgactttggcgccttcgcccagttgagcgtttttcagttcgacaaagttacccacatgggccttggcccccagctcgctacccgggcgcaagcgcgcaaacggcccggcatcgctgccctcgcccatcaccgcaccgtcgatatggctattggccttgaccaccacgcctttgcgcaaggtgctgtccttgatcacgcagttcgggccgatgactacaccgtcttcaatgatcacgcggccttcgaggatcacgttgatatcgatcaggatgtcgcggcccaccgtgacttcgccacgcacatcgaaacgcgccgggtctcgcagggtcacgccctgggccatcaggcgcaggccttcgcgcagttgataatgacgttccagctctgccagctgtttgcggtcgttggcgccctgcacttccatcggatggtggggctgctcggtggcgaccagcaggccatcgctgacggccatctcgatgacgtcggtgaggtaatactcgccctgggcattgttgttggacaggcggctcatccagtcggcgagcttgttggcaggcaccgcgagaatgccggtgttgccttcagtaatcgcgcgctgggcttcgctggcatctttgtgttcaacgatggcagccaccttgccgtcggcgttgcgcacaatgcggccgtagcccgtagggtcatccagctcaacggtcagcaggcccatctggccaggcaccacgtgcttgagcaggcgttgcaaggtttccacttcaatcagcggtacatcgccgtagaggatcaataccgtgtccgcggtgatgaaaggcacagcctgcgcggtcgcgtggccggtgcccagttgcttgtcttgcaatacgaaattcagatcgtccgcggccagacgctcgcgaaccaggtctgcaccgtggccaatcaccacatgaatacgttgtgggtccaactggcgggcgctgtggataacatgacccagcatggagttgcccgcgaccgggtgcagtaccttgggcagggctgaacgcatgcgggtgccctggcctgcggcgagaataacgatttcaagagacatgaatggctaccaatcctgggcggtccgggttcagaccaaagaagtgttttgcaaaaaagaaaaagggtagccgaggctaccctttttaatcaatcacgcatcaagcaaaacggcgtggccgcttacttcttgcggatctgctggagagtacgcagctgggctgcggcctcggccagacggactgcagcagcgctgtagtcgaagtctgcgcctttttcgttcagcgccttctcggcagccttgacggcttcctgagcggaggcttcatccaggtcgccagcacgttgcacggtgtcggcaagtaccttgaccatgttcggctgaacctcgaggaaaccaccggagatgtaaaacacctcacgttccccgccttgcttggtcagagtgatcggacctggcttcaagcttgtgatcagcggggcgtgacccatggcgataccaagatcacccaggtcaccgtgcgctgttacaaactcgaccagaccggagaaaatttccccttccgcgctgacgatatcgcaatggactgtcatagccatctgattgcctcaacctgatgagcgcccgtttccgggcgcctggattacagtttcttggctttctcgatcgcttcttcgatgccgccgaccatgtagaacgcttgttctggcaggtggtcgtagtcaccgttgaggatgcctttgaagccagcaatggtgtctttcagggaaacgtatttacccgaggcaccggtgaagacttcagccacgaagaacggctgcgacaagaaacgctggatcttacgagcacggtttaccaactgcttgtcggcttccgacagctcgtccatacccaggatcgcaatgatgtccttcagttctttgtaacgctgcagcacgtactgaacgccgcgagcggtgtcgtagtgctcctggccgatcacgttcgggtccagctggcgcgacgtcgagtcgagtggatcgaccgctgggtagatacccagggaagcgatgtcacgggacagaacgacggtggcgtccaagtgggcgaaggtggtggctggcgacgggtcggtcaagtcatccgcaggtacgtataccgcttggatcgaggtgatcgaaccttccttggtcgaagtgatacgttcttgcagaacgcccatctcttcagccagggtcggctggtaacctactgccgaaggcatacggcccagcagtgcagatacttcagtaccggccagggtgtaacgatagatgttgtcgacgaacagcagaacgtcgttaccttcgtcacggaacttctcggccatggtcaggccagtcagggctacgcgcagacggtttcccggcggctcgttcatctgaccgtaaaccagtgccactttgtccagaacgttggagtccttcatctcgtggtagaagtcgttaccctcacgagtacgctcacccacacctgcgaacacggaataaccgctgtgctcgatggcgatgttacggatcagttccatcatgtttacggtcttgcctacaccggcaccaccgaacagaccgactttaccgcccttggcgaacgggcaaaccaggtcgataaccttgatgccggtttccagcaggtcattgccgcctgcttgttctgcgaacgaaggtgctgcgcggtgaatgccccagcgctcttcggtggcaatcgggccagcttcgtcaatcgggttgcccagtacgtccatgatccggcccagggtcgctttaccgaccggtacggagatggcagcgccagtgtcgacaacgtccagaccgcgcttcaagccttcggtggaacccatcgcaatggtacgaactacgccgtcgcccagctgctgctgaacttccagggtagtttccgcgccttgtactttcagcgcgttgtagatgctcggtacgctgtcgcgtggaaattccacgtcgataacggcgccgatgatttgaacgatacgtccgctactcatagctggatcctctgaatatttgaaccgttaaaccgcggcagcgccgccgacgatttccgagatctcttgggtgatcgcagcctgacgcgccttgttgtagatcagctgcaaatcgctgatcagatcaccggcgttatcggtagcgtttttcatcgcgatcatccgcgccgcttgttcagctgcgttgttctcgaccaccgcctggtacacctgcgactccacgtagcgcaccatcaagccgtcaagcagctctttggcgtctggttcgtagaggtagtcccagtggtgcttgagttcctgatccggggtcgccaccagtggaatcaattgctccacggttggctgctgggtcatggtgttgatgaacttgttggataccacggagaggcggtcaatacggccttccaggtacgcatccagcatcaccttcacactgccgatcaaatcattgatcgacggctcttcacccaggtggctgatagctgcaacgacgttaccgccgaagttgcggaaaaaggccgcacccttgctaccaacaacacacagatcaatctcgacgccgttttcgcggtttaccgccatgtccttgaccagggccttgaacaggttggtattcagaccaccacacaaaccacggtcactgctcactaccacataacccacacgcttgacggcgcgctcgatcatgaacgggtggcggtattccgggttggcgttggccagatgcccaattacctggcggatacgctccgcataaggacggctagcagccatgcgcatttgtgccttgcgcattttgctgaccgccactttttccatggcgctggtaattttttgcgtgcttttgatgctcgcaatcttactgcgaatctcttttgcgcctgccatgtaacacctatcaggttagcaagcgggagccttgcggctcccgctgcggcttaccaggtttgggtggccttgaacttctcgataccggctttcatgccagcgtcgatatcgtcattgaagtcacccttcacgttgatcttcgccatcaattcggcgtgatcgcggttgaagtaagcaatcagcgcttgttcaaagctgccgaccttggcgatttcaacgtcggtcaggaacccacgctcagcggcatacagcgacaacgccatgtcagcgatcgacattggggcgtattgcttctgcttcatcagctcggtaacgcgctgaccatgctcaagttgcttacgggtcgcttcgtccaggtcagaagcgaactgggcgaatgccgccagttcacggtactgagccagagcggtacggataccaccggagagcttcttgatgatcttggtctgagcggcaccacccacacgggataccgaaacaccggcgttcactgcaggacggatcccggagttgaacatggccgattccaggaagatctgaccgtcagtgatggaaatcacgttggtcggaacgaacgcggaaacgtcgccagcctgggtttcgatgatcggcagtgcggtcagggaaccggttttgccggtcactgcgccgttggtgaacttctctacgtactcttccgaaacgcgggatgcgcgctccagcagacgggagtggagatagaacacgtcgcctgggtaggcttcacggcctggtggacggcgcagcagcagggaaatctggcggtaagccactgcttgcttggacagatcgtcataaacgatcagcgcgtcttcaccgcggtcgcggaagaattcacccatggtgcaaccggagtacggtgccaggaattgcagcgcaggagattccgaagcactggcagccacgatgatcgtgttggccagggcgccgttttcttccagcttgcgaaccacgttggcgatggtcgattgcttctgaccgatggctacgtagacgcagaaaatgccgctgtctttctggttgatgatcgcgtcgatcgccagagcggtcttaccgatctgacggtcaccgatgatcagctcacgctggccacggccgactgggatcatggcatcgacagccttgtagccagtctgtacaggctggtctaccgacttacgccagatcacgcctggagcaactttctcgaccgcgtcggtctcggtgttgcccagtggacctttaccgtcaacagggttacccagtgcgtcgactacgcgacccagcagttccttaccaaccggaacttccaggatgcggcctgtgcacttggcgctcatgccttcagccagactggtgtacgcgcccaatacaacggcacctacggagtcttgctccaggttgagggccataccgtagacgccgcccggaaactcgatcatctcgccgtacatgacgtcggccagaccgtgaatccgcacgatgccgtcagatacgctgacgacagtgccttcgttacgggcttgggaggtcacatcgagcttgtcgatgcggcccttgataatttcacttatttcggaaggattgagttgctgcattgctctgctgccccttcaaactcaagatttcaatgcttcggcaagtttcgcgattttgccgcgaatcgagccatcgataaccaggtcgccggcacggataacaacaccaccaataagcgatgcgtcctccgaagcttgcaggcgcacttcccgattgagtcgtgcactgagaaccttggcgagtttgtcttgctgttcttggttcaatgcgaaagcactggtcacttcaacgtctaccgatttctctgcttcggccttgtacaggtcgaacagagcggcgatctccggcaacagcgggagacggtcgttttcggcaatgacgtggatgaagttctgcaccttcacatcaaacttgtcgccgcacacttcaataaaagtggcggccttgtctgcgctcgtcaggcgcggggccttgagcacgcgctgcatggtgtcgtcttgcgacactgctgcagccaggccgagcatggctgaccaagaggccagctgctggtgggcctgggcgtgctcgaaggctgccttagcgtaaggtcgggccaacgtggtcagttctgccatgatcgccctcgcttaaatttcagcagccagtttgttaaccagctccgcgtgcgcgttttgatcgattgtggcaccgaggatcttctcagcaccgccaacggccagagcacccagttgggcacgcagcgcgtctttgacaccgttcagttcctgttcgatctcggcatgagccgaagccttcacacggtcagcttcgacgcgggctttttcaacagcctcttcgacgatctggttaccgcgtttcttggcttgctcaatgatctcggctgcctgtgctttagcttcgcgcagttgctgacccactttctcgtgggccaactccaggtcgcgagctgcacggctggcagcgtccaaaccatccgcgatcttcttctgacgttcgtgcaaagccgcgatgaccggaggccacacgaacttcatgcaaaacactacaaaaatgaagaacgcaacggattggccaatcagggttgcattaatgttcacgccaacacctcgctcattcgttgtccatcaccccaatcactcgaaaagtcgagtgattagccagcgagttgaccaacgaaggggttcgcgaaggtgaagaacagtgcgataccaacgccgatcatggtcacggcgtcgagcaggccggcgacgatgaacattttaacttgcagcattgggaccatttctggctgacgcgctgcgccttccaggaatttgccgcccagcaggccgaaaccaatggcagtacccagggcgcccaggccgatcaacagtgcaacagcgatagcggttagaccaactacagtttccatctttcctcccgacttttacgtcgtatggtttaggttttttagattttaaagcggtaaaacaaatcgtttcatagccctgttgggccaccttcccgtttgaccgggaaggacatcagactagtcgagactggtcttaatggttctcttcgtgcgccatcgacaggtagacgatggtcagcatcatgaagatgaaggcctgcagggtaatgatcaggatgtggaacacagcccacgcccactgcagaactacgcccaggccgctaagccagagcagaccgctgccgaacatcacagcgatcagaatgaacaccagctcgccggcatacatgttgccgaacagtcgcagagccagggaaatcggcttggcgatcagggtgacgaattccagcaggaagttcaccgggatcagcagggcttgaacgaagatgttcttgctgccgaacgggtgcagggtcagttcgccgatgaagccgccgatgcccttgaccttgatgctgtagaaaatgatcagcgcgaataccgacagagccatgcccagtgtggcgttcgggtcagtggtggatactgcgcggaatggaatgtgcgggtcgccggagatcgccatggccaactgaggaatccagtccaccgggatcaggtcgacggcgttcatcaggaacacccacacgaagatggtcagtgccagcggtgcaatcaccgggctacggccatggaagctgtctttcacgctgccatcgacgaattcgaccaatacttcaacgaagttctgcaaagcacctggctgacccgaagtcgccttctttgccgccatgcggaaaatcaggacgaagatcagacccaatgcgaccgaccaacccagagtgtccaggtggaaagcccagaaacccatttctttggcttctgctgcggtgtgggcaaagccccagccgccattaggaagctgaccgaaggtcaggttctgcaagtggtgctggatatagcccgaagcggttgtttctgccatggttgcctcaaacgccctaaggtttcgaaagtcttgttttcattagcaggggagcgaaccagctgaccagttgggtcaacacgaagacgccgaatacagccagcggcgccaatggcttcacacctgcaaaggtcagtgcaaacagcactgccgtcaaaatcagtttccccgcctcgccggcataaaaagaccggacgatagcctgggctgctcgggcgccggaaaaccgaaaggccctgtgagcaaaatacatattgggcagcaaggctatcaggcctccgcagagtcctgaatacccggctacgactccatgccaataccaaagcgccaatgcggcgatcagcaaaatgacaaattgagccagtagaaccggaaaaacagccaagcgatggaacggcaacgtgtttggcgtgcgggtttccatcactcttgctcctcaatggtcggctgccggaaatcaataacttggcataatttgtgccgacaaaatgcgcgcagagtataggggcggttcagcccctattcaactgtcgggtagtgatttccgatcacgcgctacataagcaaatgtttcagcggatgtgggcaaggacgccttgaagctcgtcaagggagttatatccgatgaccaattgccctttgcccttcttgccgtgacgaatttgcaccgcagagcccaggcgctcggccaggcgctgctcgagtcgcgcgatatccggatcaggtttggcggtttcgaccggtgcaggtttgccgctgagccactggcgcaccagcgcttcggtctgacgtacggtcaggcctcgtgcgacaacgtgtcgcgccccttcaacctgttgattttcgggcaaaccgagcaacgcacgggcatggcccatttccaggtcgccgtgggacaacatggtcttgatcacttccggcagcgcgatcaaacgcaacaaattggacacggtgacgcgggacttgcccaccgcctcggccacttgctgctgggtgagctggaattcctgctgcaaacgctgcaacgcaatcgcctcttcgatcgggttgaggtcttcacgctggatattctcgatcaacgccatggcgatcgcggtttcatccggcacatcgcgcaccatggccgggatggtttccttgccggcctgctggctggcgcgccagcggcgctcaccggcgatgatctcaaagcggccaccgccaatggggcgcaccacgataggctgcatcacgccctgggccttgatcgagttggacagttcttccagggcctgggggtccatgtcccgacgtggctggtatttgccgcgctggatcaggtccagcggcaagtgctgcagctcgcgctcgtcggcctgcaccgcttgttcttcaagcgatgtgacggtcggaccactcaacagtgcatccagtccacgtccgagacctcgtttcttgacggccatgggggttccttaagttggctgggctgcagcggtgcgtgaattgcggcgttgacggcgaaccatctcgccagccaatgccaggtaggcaatggcaccgcgcgaggatttgtcgtacgccagcgcgggcatgccatagcttggcgcttcggccaggcggatgttgcgtggaatcacggtgtcgtacaactggtcaccgaagtgttccttgagctgcgccgacacatcgttcatcaggctcaggcgcgggtcgaacatcgtgcgcaacaagccttcgatctgcagtttcgggttgagcaactcggcaatgcgcttgatgttatccacaaggtcgctcaggccttccaacgcgtagtactcgcactgcatggggataatcaccccatcggcggctaccaaggcgttaagcgtgagcatcgacagcgacggtgggcagtcgatcaaaatgtaatcgtagttgtcgcgaatgggcgccagggcgctgcgcagacggctttctttcatctgcatttccagcagcaccacttccgccgcggtcagatcgcggttggccggcagcagttggtaaccgccgtgctcggaatagtgcatggcctgggccaggtcgcattcgccaatcagcaaatcgtagaccgagttttccaggccgtgtttatccacaccgctacccatggtggcgttgccctgtggatcgagatcgatcaacagcacccgacgcttggttgcgaccagggatgctgcgaggttgatacaggtggtggttttacccacaccacctttctggttcgctatcgcgaataccttagccattcttgcttgtgttcccaatcatgccgtgcggcgcagtatcagcagatggcgttggccttggcaaccaggtacggccaaggcgtgttcgctatcgaggtggaagtctgccggcaatgctaacagctcgtcgcttggatgaacgcccttcattgccagccagcgggtatcacggtcgcccaggtggcgcgtccagttgctgaagttctccatgctgctgaacgctcgggacacgatcccgttgaaaggcagttcaggtgtgaaggcttcgacacgactgtggataacttgcaggttatccagcttgagctcgagtttgacctgggtcaggaagcgggttttcttgccgttgctgtccaggcaggtcacgtgggactcgggaaacaggatcgccaacggaatgccaggcatgccgccgccactgccgacgtcgagccaacggccattttcgataaacggcatcacgctgaggctgtcgagcaaatgccgcgacaccatctcgtccagatcacgtaccgcggtcaggttgtaagccttgttccatttgatcaacagggccagatagcccagcagtaactcatgctgggcttcggtcagggccacgcccaactggcgcgctcctgtggataactcttcggcgtgttgcgaggtgaccaacgaactcaagcgctttgctccaactgacggcccgcgccgcgttttttcaaatgaatcatcaacagcgagatggctgccggggtgacgcctgggatacgtgaagcctgcccgagggtttccggccgagttatccccagcttgctttgaatttctttcgacaacccggaaatcccggtgtagtcgatatccacaggcagcttggtgtcttcactggcgcgcagccgggcgatctcgtcctgctggcgatcaatgtagcctgcgtatttggtcttgatttcaacctgttcggcaacctgtgggtcttctgcgccgtggccagtcacttcgaccagaccagcgtagtcgatttccggacgggaaagcaggttgagcaagttgtactcatgggtcaacggcgtgccgaatttttccgcaatggcgtcgccctgctccgtgcccgggcgaacccaggtactcttcagacgctgttcttcgagcgcaatgctttcgcgttttttgcagaaggccgcccagcgggcgtcatcgaccaggcccagctcgcgacctttttcggtcaagcgcaggtcggcgttgtcttcgcgcagaatcagacggtattccgcccgagatgtgaacatccggtacggttcctgggtacccagggtaatcaggtcgtcgaccaatacgccgatgtaggcctcatcgcgacgcgggcaccagctgtctttgccctgtgcacgcaatgctgcgttggtcccggccagcaaaccttgggcgccggcttcttcataaccggtggtgccgttgatttggccggcgaagaacaggccgccgatcactttggtttccaggctgtatttcaggtcgcgcgggtcgaagtagtcgtactcgatggcgtagcccggacgcacgatgtgcgcattttccataccgcgaatcgactgcacgatctggatttgcacgtcgaacggcagcgaagtggaaattccgttcggatacagctcgtgggtggtcaacccttccggctcgataaagacctggtggctttctttgtcggcaaagcggtggatcttgtcttcgatcgacgggcaataacgcggcccaatgccttcgatcaccccggaatacatcggcgaacgatcaaggttcgcagcaatgatttcgtgggtacgggcgttggtgtgggtgatccagcaactgacctgtttcggatgctgttccttggagcccatgaacgacatgaccggaatcggcgtatcgccggcttgttcggtcatcaccgaaaaatccacagaacgcccgtcaatacgtggcggggtcccggttttcaggcgaccgacccgcagcggcaattcccgcaggcgttttgccagagcaatcgacggcggatcgccagcgcgaccaccggaatagttctgcataccgatgtggataagcccacccaggaaggtgccggtggtcagcactacggattctgcgaagaaacgcaggcccatttgagtgacaacaccgcgtacctggtcctgttcgacgatcaggtcatcggctgcctgctgaaatatccacaggttcggctggttttccagggtttcacgtaccgcagccttgtacagaatacggtcggcctgggcacgcgttgcacgcacggccgggcctttgcggctgttgagcacacgaaactgaataccacctttgtcggtggccatggccatcacgccgccaagggcatcgatttccttgaccagatggcttttgccaatcccgccaatcgcggggttgcaactcatggcaccgagggtttccacgttatgcgtcagcaacagggtttttacacccatgcgtgctgacgccagtgctgcctcggtaccggcatgaccgccgccgatgacgatcacttcaaaacgggaagggaaatccaccacgcacctcgtgcctgcttatgtaggtaatcaggaattgtttgttgaaagggttttagagctttgcgggcaagtatagggacttagcccttcctaaagaaccctttgcacaaaatttaaccagctgtggatgagtcacagacaatagaaattaaaagagagaaatttattaaatctttgtttttatgtttatttatactgagcaccatttctgtggatagatctctacagccctttatttacaatgtgtacagcgattcaaaacgttgtgatcatctgccaatgaggcccttggataagtgctttaagcctgtggattaaaccggtggttatccacagacgggtttttactcaggtttcagaccctgttatcaactgggcacaggagcggttattcacagggcttaatccacagaaacgccagatttcgtccacggcaagctaggaattaatcctgagtaggacaaaaagagatctattgtgggaaaacactgggccagttaataatagcgattatcattaacccaccttgtcgcgcctatgcctccctcttcccataccgcagcggtccagcacatctatgagcaacatcattcgtggctgcgcgggtggctcaagggaaaattgcataacgccagcgatgcagccgatgtggcccacgatacgttcgtgcgcatgctcggtggacgtcacgcagcgcagatccttgaaccacgggactatctggcgaccatcgccaggggcctggtgatcgaccgctatcgccggcatgccgtcgaacaggcctacaggcaaaccctggcagagcgtcctgaagccacggctatcagtgaggaagacaaggcaatcatcatcgaaacgctggtggctgtggataaagcgctgtctgggctgggtgagcgggcccgccgaattttcatgctggcacagattgaagggctgacttatcaacagatcgccgatcaactgcaggtatcactgaccacggtgaagaaacacatgatccgtgcccttaccgagtgctccctgatcatggccagccggtaatgaccaaccccgaccgcaagacgttcgaggccgctgccagttggtatgtgcaattccagtcgcaaccaccgacgctggcacaacatcaagcctggcagcaatggcttaatcgtgacccgtcccaccaggcggcctggaaccagatggagcagctgcaacgcagcctcggtggcctgccccctgacctcacgcgccgcgcgttatccgccacgcaacagcggcgccaggtactcaagtggatgctggtgctcggcggcagtggctatctgggctggaacgtccagcaacatacgtcgctgggtaacgcatgggctgattaccgcacgtcggtgggccagaggcgacgcatcgagctggcggatggcacgcagatcaatctcaatactcataccgctatcgatgtggcatttgacgggcgccaacggttgattcgtctgcgcgagggtgaagtacttatccacaccggcaaagggggtgggcacttaccgttttatgtagagactcgccaaggccgggtccaggcgctgggcacccgttttactgtgcgccaactgccggacgccacgcgggtaggcgtcttggaagaacgggtggaggtatctcccggcgaccaacccgaacttcaccgaattattggcgcgggtgagagcgcagagtttgatcggcacgatgtgcgccttacccaggggtatggcggtgtacaggcagcctgggtagatggccaactgatcgtactcgatgctcggctgggagaggttatcgatgagttggcgcgctataggccgggtgtgttgcactgtgaccaagcgtctgcgggcctgcgtgtttccggtaccttccgtctggactcaaccgatgccgtcctggccaacctgcaagcgagcctgccgattcaagtgaaatactttacgcgctattgggtgtcggtcacccgaatcggctgaccgaaaaaataatccacagaggggttatctttttttgacctggcgcggccctacaggtaatcacgacgctaccttcagggcttactcacctatgcgccttcccgccccgctccgcaaacgactttcctgccatggcatgacctacggtctgcagctcatcaccgcgacgaccggtgtgttgttatccaccgccgtcatggccgccagcgcaacgcaacactttgcaattgccgctggcccgctggacaaggccttgagccagtttgccgccagggccaatgtgattctgtccttctccccccagcaaaccgcgcgtttgaattcgccagggctgcaaggtgattactcggtggaccagggctttgcgctgctgctgcagaactcggacctgcaggcggtcgtacaggctcccgacagctatgtattacagccggcacctgctggccaactgaccttggcccctaccaccgtgagcgcttatcaacagggcggtttcaatcaagagatcggcggggatgtaggctacaaggcgcagaacagccgcatcggcactaagaccagcacaccgctgtccgagactccgcgttcggtgtccgttgtcactggccagcgtatcaaggaccagaagtcccaaaccctgacagaagtgttgggctacgtaccggggatcttcgccccaccgttcgcggccggcgacggcttggcaggcgatctgtttttcattcgcggtttcaacgctacggattacggctacggcctgctgcgagatggcctgcgggtgcaaggcaatcgatacgacaccaccagcgaaccctacggcctggaacgggtcgagattttccgtggcccttcttccttgctctatggtgaaaacgcacccggcggcctggttaacctggtgagtaaacatccgactgcaaccccgcaaggcgaggtgcaggtgagttatggttcgaatgatcgacgccagctgggtgtggatatctcgggcccgctcaacgacagtgacaatatcctgggccgagtggtgatgctggggcgtaaatccgacacccagaccgatcacgtccccgacgatcgtctgtatatcgcgccatccctgaccctgaacttcgacgactacaacaccctgacgctgctggccaactaccagaaagaccataccaacctggaactcggcctacctgcagccggcacgctgcttaccaatcccaacggcaagctgtccaaacacaccctgctgggcaacccggactggaacacctttgaacgccaagcgtggagcgccggctatgagttcagccacagcttcaatgatgattggcagttccgtcagaactctcgctatatgcagtcacgcatcaaccggcatgaaacctggccaggcacactcaataacggcggcttcggcacccggctgaacatgaacgcctacgaccgctacaacaaatcgatggtctattccctggataaccagctcgaaggcaagttccaggtgggcggcctggaaaacacggtgctattgggcgccagctatgaccgaacctcgttcaatcaagactgggatgcgggtttcgccggcaccatcgatgtgtataacccggtgtacctgcgcgacccgctcactccactggcagtgcaaaacaccttgcttgaacagcagatgaaaggcgtttatgcacaggtccagagcaaatacgaccattggctctttctgctcggcggccgccaggactgggtcgacagcgactaccgcgacaaggtccagccatcgagcaatatcaactcacaggatcgtaaattcacttaccagggcggggtgatgtaccagttcgacaacggcctgacgccgtatgtcagctattccaccgcctttgtccccgtgcagcagatctccaacgccggctcgccgttgaaaccgatcaccagcagccaatacgaattgggcattaagtacgaaccgatcggctgggatacggcgatgaccgtgtcggtgtatgacctgcgcaagcaggacgatacctacctggatgccaccaccaacagctatcgccaagtcggtgaaagtcgcgcaaagggcgtggaagtagaggtcaacagcaacatcagcgccaacttcaacgtgacggcggcctatacctacaccgacgcccggataaccaaggattcggccacgtcgctggttgaaggccgtcaaatgacgggcgtgccgcgtaaccaggcttcggtgtggggtaaatatcgcttcctggatggccaactcaagggtttctccctgggcggcggtgtacgttatttcgacagtacctttgcctacacggcgccgacgctctacggcaagctggatgcaggaagcgtcaccttggtggatgcggcactgggttatcagatcaatccacactggtcggtggacctgaacgccaagaacctgtttgacaaggaatatgtatctggttgcaacgatgcagggcgttgctattggggcgacagccgtaccttgctcggtacggtgtcctataactggtagtcgttgtggataactcgactatttgccgatgcagaagctggagaaaatccgcccgagcaaatcatctgaactgaaagccccggtgatttcacccaacagctgctgcgcctggcgcagatcttcagccagcagctccccagcccccgccaaggtcagctgggcgcgcccgtgctccaaggccgcgctggcatgacgcagcgcttccaggtgcctacgccgtgcactgaagctgctttccgacgtctgttcgtagcccatgcaggctttaaggtgctcgcgcagcaactccagaccctcaccggccgatttcgcgctcaagctgatcgtgacgtggccatcttcactggtttccagggcgatggcttcccccgtaaggtcggccttgttacggatcaaggtgactttggctgggtctggccgttgttcaaggaattcgggccacaaggcaaaaggatccacagcttccggcgcagtggcatccaccaccagcaacacacgatcggcttcgctgatcgccttgagcgcacgttccacgccgatcttttccacctggtcgtcggtatcgcgtaaaccagcggtgtccaccacgtgcagcggcataccgtcgatgtggatatgctcgcgcaagatatcccgggtagtgccggcgatctcggtgacgatggccgcctcgcgccctgccagagcattgagcaggcttgatttgccggcatttggtcggccggcaatcaccaccgtcattccatcgcgcagcaaggcgccctgcccggcttcgcgcagcactgtggataactcatcgcggactttatccagcatcgccaatacgtggccatccgccaggaagtcgatttcttcttccggaaaatcaatcgcggcttcgacgtagatgcgcaggctgatcagttgctcggtcaagttatgcacacgcagggaaaaagccccctgcaatgaacgcaatgcgttacgtgcagcctgtgcagaactggcttcgatcaaatcggcgatggcttcggcctgggccaggtcgagcttatcgttcaagaatgcgcgttcgctgaattcccctggtctggccaggcggcaacccaattgcaagcagcgctgcagcagcatatccaacaccacaggcccaccgtgcccttgtaattcaaggacatcttcaccggtgaacgagtttggccctggaaaatagatggccagcccctcgtccaatacgctgtggtcggcatccaggaactggccgtaatgggcataacggggtttcagctcccggccgctgatagccttggctgccacgcccgccaatggcccggaaattcgaacgatgccgacgccgccccgaccttgagcggtagcgacagcagcgatggtttcacgaggagcgctcatcagcaggttccagaacaaaagtgacggaaagcaaaacgccccactagggggcgtcttgagtggttatccacagagtaaattacgcctcggctttttgggtagccgcttcgattttacgtgtgatgtaccactgttgagagatcgacaacacgttgttgaccacccagtacagtaccaagccagcagggaaccacaggaagaagaaggtgaagatgattggcatcattttcattaccttggcctgcatcggatccggcggggttgggttcagacgctgctggatgaacatggtcgcgcccatgatgatcggcaggataaagaacgggtctttgatcgacaggtcagttatccacagcatgaacggagcttggcgcatttccacgctttccaggagtacccagtacagcgacaggaacaccggcatctgtaccagaatcggcaagcatccacccagcgggttgatcttctctttcttgtacagctccatcatggcctgcgacattttctgccggtcatcaccatgttgttctttcagcgcggccagtttcggggccacggcacgcatacgcgccatcgatttgtagctggctgccgacagagggaagaaaagccctttgatcagcatggtcaggaagatgatcgaccagccccagttaccgacgatgctgtggatatgttgcaacagccagaagatcggctgggcaatgaaccacaggaagccgtaatccacagtcagttccagacctggggacaactctttcaatacggcctggcttttagggccggcgtacagggtagcgctggtttcagccttggcacctggagcgacggtcaacgccgggccagtgaagccaatgatgtagttgccctggctgtccttgcgggtttgaaccaggttcgcatcccccttgttcgggatccaggcggtcacgaaatagtgctgcagccacgctacccagccaccttggacggtttctttcagcgtgcccttgtcgatatctttcatcgacacttttttgtacggctcgttacttgtccacagggcagcgcccaggtaagtcgcggtaccggtggcggtgctggaagacggatcggagctggcgtcacgcttgagctgggcaaacaggttgccgctccaggctttgtcgctggtgttgtcgatcaggtaagtgaccttcaagtcgtacaaaccgcgggtaaagctgaaacgcttgatgtagttgacgccgtcgaggctgaatttcaggtcgacgttcaactggttctggccgtctgccagttgataagtcttctgttcggtcgaataaaccggacgaccggtagcacgtgcatccggaccattggtgccggtcaggccgctttgcgccagataagtacgttcaccgccgttatcgaacagttggaacggcacatccggatggtcttggcgacgtggataaagcggcagcttcagctgtgcgatatcaccaccctgtgggtcgatagccaggtcgagcacatccgtttttacgtggatgaggtctttgttggtgaccactggcgtttctaacggggcacttgtctcgccattcgcgctgggaacatcggcactcgcggacgcattgttacccagcggggtgtccggaatagccggcgcagcctgattggtagcaacattctgagtcggcagggcagcctgaccgtagtcctggttccatttaaggaccatgacataggacacgattgccagggcgacgatcaggattgtgcgtttaatatccatgattactcggccatcgaagaagaacgggaggtagggataggtggaaccgggtcataaccaccgggattccacggatgacagcgacctaaacgacgaaaggtcagccagccaccgcgcagaagaccatgattttctatggcctctaacgcgtagcaggaacaactggggtagaaacgacagtggctggccatcagaggactaatggcatagcgataaaactggatcggaacgattgccagtttacgcatcaaggctgtctacccctacagtttcggtgctgactgctggtgctggcttgtgggtacgcgccaaacgtttccagagcttgccgaaatgctgaatcaattcggggttttctacatcacccaagcctttgcgcgcgacgataacaatatcccaaccaaccagagtgtcctggtggaggcgaaacgattcgcgcatcagacgcttgaggcgattgcgctcaacggagagctttacgctcttcttgccgatcaccaacccgagacgggggtgatcaagatcgttgttacgcgcaaggagcaggagatttttccccggaaccttgccggtgggggagtcaaagactgccttgaaatgccggggggttagcagacgcttttcccgactgaagtcctgactcaccaccagtaccggattatcaaactgccagacgcgcacgacctttggcgcggcgacgcgacaggacagcacggccgttcttggtagccatgcgagcacggaagccgtgagtacgggcgcgtttgatggtgcttggttggaaagtacgtttcatggcgttgttacctggttcgtccacaacgggccggaatggcccccgttttaagagaccggcgattctagagaaagcaagcctctaggtcaatttccaaccagcttttcctttaattagatgtccacggggtcctgacgcccttctccccgtttggcttccatctgacatgccatagatataaaaataaagaaggaagttatttaaagcttttctgtaaagcttataaaagctagaggcgtcattatctgtggataactgcctttagcccttgttctacgggttgtacagagaatgacaacacgggggagaagcggtgctctgcctgtgctgcgctatcggataagctgtgtgtggaacagctagttatccacaggtcggttacccacagactttcgaccccacttgtacaatgagcttaggtgggtttatccacagagcttatgcacagaccactggtcgcattttttacggttaaggcattgattttgggtgtcctgtgagcaacctacatgtggataagtggacggctggccgctacaatggcggctgtttttgcctcaccggctttcaacttaggggatatccgtgtcagtggaactttggcagcagtgcgtggagcttttgcgcgatgagctgcctgcccagcaattcaacacctggatccgtccgctacaggtcgaagccgaaggcgacgagttgcgtgtctatgcgcccaatcgttttgtcctcgactgggtcaacgagaagtacctgggccgcgttctcgaattgctcgacgaacatggcaacggtctggcgcctgctctctccttattaataggcagcaagcgcagctcagctccccgcgccgcgccgaatgcgccattggccgccgccgcgtcgcaagcccaagctgcagtggcgcctgtcgccgctgcacctgcaccgacatctgcgccgtccaaaccttcgtcgcgcaaaaatgcgccggagaatgaggagccgtcccgcgacagcttcgacccgatggccggtgccagctcccagcaggcgcctgtgcgctccgagcaacgcactgtgcaggtagaaggcgcgctcaagcacaccagttacctgaaccgcacgtttaccttcgaaaacttcgtcgaaggcaagtccaaccagctggcccgagcggccgcctggcaggtcgccgataaccccaagcatggttacaacccgctcttcctttatggcggcgtaggtttgggtaagacgcacttgatgcacgccgtcggtaatcacttattaaagaagaacccgaatgccaaggtggtttacctgcattcggagcgctttgtggccgacatggtcaaggccttgcagctcaacgcaatcaacgagttcaagcgtttctaccgctccgttgatgccttgctgatcgatgacattcagtttttcgcacgcaaggaacgttcccaggaagagttcttccacaccttcaacgcgctgctcgaaggtggccagcaggtcatcttgaccagtgaccgttacccgaaggaaatcgaaggcctggaagaacgtctgaagtcgcgtttcggctggggcctgaccgttgcagtcgagccaccggagctggaaacccgcgttgcgatcctgatgaagaaggccgatcaggctaaagtcgatctgccgcacgatgctgcgttcttcatcgcccaacgcatccgttccaacgtgcgtgagctggaaggcgcgctcaagcgggtcatcgctcactcgcacttcatgggccgcgatatcaccatcgagctgattcgcgagtccttgaaagacttgctggccttgcaggacaagctggtgagtgtggataacatccagcgcaccgtggccgagtactacaagatcaagatttccgacctgctgtccaagcgccgttcgcgctcggttgcacgtccacgccaggttgccatggccctctccaaggagttgaccaaccacagcctgcccgaaatcggtgatgtgtttggcggacgcgaccacaccacggtcttgcacgcatgccgcaagatcaatgaacttaaggaatccgacgcggatattcgcgaggactacaagaacctgctgcgtacactgactacgtgatgacaccagcgcagcttattaaggcaagggactagaccatgcatttcaccattcaacgcgaagccctgttgaaacccctgcaactggtcgcaggcgtcgtcgagcgccgacagaccttgccggtgctttccaacgtattactggtggtcgaggggcaacagttgtccttgaccggtaccgacctggaagtcgaactggtgggtcgcgtccagctcgaagagcccgccgaaccgggcgagatcaccgtgccggcgcgcaaactgatggatatctgcaaaagcctgcccaacgatgcgctgatcgacatcaaggtggatgagcagaagttggtggtcaaggccggtcgcagccgtttcaccctgtcgaccttgccggccaatgatttccctaccgtggaagaaggcccgggctcgctgacgtgcagcctggagcaaagcaagctgcgtcgcctgatcgagcgcaccagcttcgccatggcccagcaggatgtgcgttactacctcaacggtatgctgctggaagtctcggaaggcatcatccgcgccgtggccaccgacggtcaccgcctggcgatgtgctcgatgcgtgccgatatcggtcagccggatcgtcaccaggtgatcgttccacgcaaaggtatccttgaactggcgcgcttgctcaccgagccggacggtaacgtcagcatcgtgttgggccagcaccacattcgcgccaccaccggtgagttcaccttcacctccaagttggtagacggcaagttcccggactacgagcgtgtgttgcctaaaggtggcgacaagttggtggtcggtgatcgtcaggctctgcgtgaagccttcagccgtacggcgattctgtccaacgaaaagtaccgcggtattcgcctgcagctggccaacggccaactgaaaatccaggccaacaacccggaacaggaagaggcagaagaagaagtgggtgtcgactacaacggcgcttcgctggaaatcggttttaacgtgagctacctgttggacgtgctgggggtgatgaccaccgaacaggttcgtctgattctttcggactccaacagcagcgccctggtacaagaatccgacaacgacgactcggcttacgttgtcatgccgatgcgcctgtaatcatgctcagcagaagctagatgtcccttagtcgcgtctcggtcaccgcggtgcgcaatctgcacccggtgaccttctccccttccccccgcatcaacatcctccatggcgccaacggcagtggcaaaaccagcgtgctggaagccatccacctgctggggcttgcgcgttctttccgcagtgcgcgcctgctacccgtgattcagtacgaacatttggcctgcaccgtatttggccaagtggaattggctgagggcggtcatagcagcctggggatatcgcgtgatcgcggtggggaatttcagatccgaatcgacgggcaaaatgcgcgcagcgcagcgcagctggctgagatcctgccgttgcagctgatcaaccccgacagctttcgattattggagggtgccccgaaaatccgtcggcaattcctcgactggggcgtgttccacgtggaaccacgcttcatggccacttggcagcgcctgcagaaggccctgcggcagcggaactcatggctgcggcatggtacacttgacgccgcttcgcaagcagcctgggaccgtgaactgtgcctggccagcgacgaaatagatgaataccgccgtgcctatatcaaagccttgaaaccagtctttgagcagaccttgagcgagttgttggacctcgaggggctgacgctgagttattaccggggttgggacaaagaacgtgagctgagtgcagtgctcgcaacgtccttgcaacgggatcagcaaatcggccacacccaggccggaccccaacgcgctgatttgcgccttagattaggtgcacacaatgcggcggacatcttgtcccgcggccagcagaagttggtggtctgtgcgttgcgtatcgcgcagggccatttggttagccaggctcgacgcggtcagtgtatttatttggtggatgacttgccgtcggagctcgacgagcagcaccgccgctcgctatgccgcttgttggaagacttacgctgccaggtgtttattacctgtgtagaccacgaattattgagggaaggctggcagacggaaacgccagtcgctttgttccacgtggaacaaggccgtatcacccagacccacgaccatcgggagtgaaggcatgagcgaagaaaacacgtacgactcgaccagcattaaagtgctgaaaggtttggatgccgtacgcaaacgtcccggtatgtacattggcgacaccgatgatggtagcggtctgcaccacatggtgttcgaggtggtcgataactccatcgacgaagctctggccggtcactgcgacgacatcagcattattatccacccggatgagtccattaccgtgcgtgacaacggtcgtggcatcccggtagacgtgcacaaagaagaaggcgtttcggcggcagaggtcatcatgaccgtgctccacgccggcggtaagttcgatgacaactcctataaagtatccggtggtttgcacggtgtaggtgtgtcggtagtgaacgccctgtccgaagaactgatcctgactgtccgccgtagcggcaagatttgggagcagacctacgtccacggcgtaccacaggaaccgatgaaaatcgtcggcgacagtgagaccaccggtacccagatccacttcaagccatcggaagaaactttcaagaacatccacttcagctgggacatcctggccaagcggattcgtgaactgtctttccttaactccggtgtcggcatcgtcctcaaggatgagcgcagcggcaaggaagagctgttcaagtacgaaggtggcctgcgtgcgttcgttgaatatctgaacaccaacaagactgcggtcaaccaggtgttccacttcaacatccagcgtgaagacggcatcggcgtggaaatcgcactgcagtggaacgacagcttcaacgagaacctgttgtgcttcaccaacaatattccacaacgcgatggcggtacccacttggtgggtttccgttccgcgctgacgcgtaacctgaacacctacatcgaagcggaaggtttggcgaagaaacataaagtcgccaccaccggtgacgatgcccgtgaaggcctgacggcgatcatctcggtcaaggtaccggatccgaagttcagctcccagaccaaagacaagctggtgtcttccgaagtgaagactgcggttgaacaggaaatgggtaagtacttctccgacttcctgttggaaaacccgaacgaagccaagctggtcgtcggcaagatgatcgatgctgcccgcgcccgtgaagccgcgcgtaaggcccgtgagatgacccgccgtaaaggcgcgctggatatcgccggcctgccaggcaaactcgctgactgccaagagaaggaccctgccctctccgaactgtacctggtggaaggtgactctgctggcggttccgccaagcagggtcgtaaccgtcgcacccaggccatcctgccgttgaaaggtaagatcctcaacgtcgagaaggcccgcttcgacaagatgatttcctcccaggaagtcggcaccttgatcacagcgttgggctgcggtattggccgcgacgagtacaacatcgacaagctgcgctaccacaacatcatcatcatgaccgatgctgacgtcgacggttcgcacatccgtaccctgctgctgaccttcttcttccgtcagttgccggagctgatcgagcgtggctacatctacatcgctcagccgccgttgtacaaagtgaaaaagggcaagcaagagcaatacatcaaagacgacgacgccatggaagagtacatgacgcagtcggctctggaagatgccagcctacacttgaatgacgaagcgccgggtatctccggtgagtcgctggagcgactggtcaacgacttccgcatggtcatgaagacgctcaagcgtttgtcgcgcctgtaccctcaggagctgaccgagcacttcatctacctgccggccgtaagcctggagcagttgggcgaccacgccgccatgcaggattggctggcccaatacgaagtgcgcctgcgtactgtggagaagtctggcctggtgtacaaagctagcctgcgtgaagaccgcgaacgtaacgtatggctgccagaggtcgaactgatctcccatggcctgtcgaactacgtcaccttcaaccgcgacttcttcggcagcaacgactacaagaccgtagtcaccctcggcgcgcaactgagcaccctgctggacgacggtgcttacatccagcgtggcgaacgcaagaagcaggtcaaggagttcaaagaagccttggactggttgatggcggaaagcaccaagcgtcataccatccagcgctataaaggtctgggcgagatgaacccggatcagctgtgggaaactaccatggaccctgctcagcgccgcatgctgcgcgtgaccatcgaagacgccattggcgcagaccagatcttcaacaccctgatgggtgatgcggtcgagcctcgtcgtgacttcatcgagagcaatgctttggcggtgtctaacctggacttctgatcaggtacatctgctaaaaacaaaaggccaacgcttagcgttggccttttttgttggttcgcagtcgcgcatttttaaatgctccacgtggaacatcgacgtatttaactttccacagcgggtgtcacactctccaatcgatacccgtacccgtagatcgtcaacaactgccagccgcgatccgccgtcagccctagcttgttacgcaggcggtagatatgcgtgtccaacggccgcgacgagaccatttcttcgtggctccagaaccgctcatacaggtactcgcgagacaacggccgggccaggttggcaaatagacaacttgccaggcggtattcccgttctgtcaggttgatgggtttgcctgcgcgtgtgacggtcagttcggcatcgtcgaatgtcaggtcgttaaagctctgcacttcctggctagccgacttctgcaaaccgtggcgccgcaggacggcgctgactcgagctttgagttcgttgggcctaaacggcttgctgacataatcatccgccccgctattcaacgccgtcacgatgtcgctctcggcatcgcgactggtgagcatgatgacggcagggggcgattccatgtgctcgcgagtccagcgcaataacgctatcccggagatgtccggcagttgccagtcgaggatcagcaggtcaaaggtttcccgacgtagctggcgcagcaggtcttcaccgcgctcaaagaaatgcagagaccaaggctggtcagccgggccgggaatctgtcgcagtgtctgttccacccgtcgcaactccgcgggttcgtcatccagtattgcgacacgcataggcggggtccttcctacaaaaatacgagggcttgaatggggggcacatgttgtacaaatgccggcctctgaatctgaataattatggacggattctacagtgcttggatctctcgatacgctgaaagcgccgtaaactcaattcattacgatcttcgaagaagataccggctcctgttggtgtggaaaaggctctgtgccgatcgcctcgccggcgcctcatgcctgctccaatgtgcggtatcgttcattgcgcggtcgtgggaagtcctccaatgagaccgaaataagcttcactggtttcagaacactgcatgcacttcatcgcaaccccatggagagggatcctgggcttatgacacttttacttaatgaccatcaatgcctcggcacgctcgtggcggtagccctgtgaacctatggcgcaaagccgagaaacgccaacctacccaggcccagcttttgttccatgggttggttcgtgaatggctgctgatcggtctggtactcctgccctttaccgcctacttatccctgagcgctggcctggcgcttaacaatccgctctatgacagcctgcgccgcctcacgcccttaccggtagacccacgcatcgttctggtgaccatcgatgcgccgagcctggaagcactcggcccgtggccttggccgcgtagcgtacatgccgacctgattgaacgcctgaacgccgcccagccggcgggtattttgtttgatgtgatcttcagtgagagcggcaacagtaatgacgaccagcgcctggccgatgccgtatgcaaagccggcaatgtattgctgcccatcgccggggatagcagcgtcagccccaaggcccaggtaacgccgttgtcgccactgctcaagtgcgccaagggcgttgggcacatcaacgtcgaagcggataaagacggtgtggtgcgtagcgtgtatctacgtgagggccctgcgggaagcacactccctcagttggcgtggctggcattcgccatgagcgagcatgccgagacgatgccgggcctgccgcaagagcctactggagggcactggcaccaggaacatgagattcgtgtgccgttcacttcggaaccagaccattttcccagtgtgtcctacgtcagcgtattacgcggcgaggtacctcccgagtcgttgcggggtcgcctgattctaatcggtgcatcagcctatggcatggccgatcgtttcgtgacgccgctctcttccaccgtgggcaccactgcgggggttgagatccaggctgaagtactgaatggtttattgcagggtcgcagcatcgtcgatctgcccggctggttggcggcgttgctggcaacgtccctggtggccctgctgttgggccttctgctggtgcgcccccgctacgccctgtggatgaccttggcgggtatggccgtggctttgctgggttcatgggccttattgcgcctgggccactggtggagccccgcagcgtgcctgatcggtttgttgctgagttacctgatctggaattggcgacgcctgagcgtaatcctcgcctactttggctgggaactggcacgcctggataacgaacccaaggtgcttccggaacggcgtcgcgcgccggccagcaagggcgatgtgttgcaagggcggatttttgcccttgaacaagccgtcagccgtacccgcgatacgcggcgctttatggcggacggcttggagtgcctgccggtagcgaccctgatcaccgatccccagggcagcatcctgttggccaaccgcgtggcccgtgaagtattcggcaatgacctggtcggtgaaaacctcgtcgaacagcttgctgatctgggttatcccccgctgcacaatggtgtacgccctgccctgtcggcgctggaactggtcgagtttcgcgatatccaccaacgcagtttacgcatggaactggctcctttgctgcctgccgaaggtgattttgccctcggctggttgttgagcctcacggacctgagcaaggagcgtgaagcccagcagcaccgcgagacgatgctgcgtttcctatcccatgacctgcgtgcaccgcattcagcgatcctcgccctactggacgtgcacaacggggagtctgcggtgtttacccaaatcgaacagcaagtacggcgggccttgagcctgaccgaatcctttgtgcaattggccaaggctgaagcggacggttaccagttccagcccaccctgtttgccatgctggtgatggacgcctttgatcaagtggcggtgattgcgcagttgaagggcatccatttggttcacgacttggatgaggcggacgaggccatggtctacgccgaccaatcgctgctcacccgggcgttgttcaatgtgctggagaacgcgatcaaatactccccatccggtaccaccgtcaggttgaagcatggcagtgcgcaaggttggttggaatgcaggataagcgaccagggaccggggattgcgcctgaggatctgccggagttgtttaaccaataccgacgtttcgattcggctcaaggcagtgagggtcttggactggggctcaccatggttaaagcagtgttggagcggcacggtgggcgcatcgtgtgtgaaagtgagctgggcaagggctcgacgtttatcctgctgctgccgttattggaggactgaaaaagcggcttttctgctgtgcataaaaaaaccggtcacaaggaccggtttttttatgaagaaaaaacttatgcacgtttttccgaattttatgagcttcagaaatatgtaagtaaatcagcttgttatgatgcaaaaaagccaattcgccaacaaagcgtacacaggttatccacagatgctcaaactgccggcgtctccaccaccaccggttccggaggcagggagcccatggccctttgctgcgcttcattccacgccgcagcgcggtcgttcagggcggcgatggcacgtggcccttcgccctctgcgtacatcggttcgccgatcaccacggtgatagtgcccgggcgtttggcccagccagtcttgggccagaacttgccggcgttatgcgcaattggcagcacaggcaggttggcgttgaccgccaaggcggtaccaccgcgtgagaacttgcccaccgtgccgtagggcacccgcgtgccctcagggaagatcagcacccagacgccgtccttgagcaactcatcgcccttcttggcgacatgcttgagcgcagccttggggttgtcacggtcgatggcgatcggtcgcaacatggccatggcccagccgaagaacggcacatacagcaactcgcgcttgagcacctggctcaacggcgagaagtacgccgagaggaagaacgtctcccaggtgctctggtggttggagagaatcacgcacggttgatcagggacgttttcagcgcccttgacctcgaaacgaatgttcaggaacaccttgctcagccacaacgcgcagcggcaccagtagacgttgataaagcgatagcgcgccttgaagggcaggaacggtgcaataaaaaagctcagggtgcaccagagaaacgaactggtgcccagcagcaggtaaaagaaaaaggttctgatggcctgcaagatcgacatggcggcatttaccgttgcgggacacggcccgcctgttaaaagcgcactcccgaacagtccttggtcaggaagtcgagggcggctagttgttgataagttctgcggcaacggccgccagatcgtcaaaaatcaaggtgcctaccggcaggtttttagcctgggtcttttcgcctttcccggttttaaccaaaactggctgagagtcgacggctttggccgcctccaggtcaccgaggctgtccccgacgaaccatatcccagccaagggcaccttgtaatgttctgcaataattttcaacatgccaggcttgggcttgcggcaatcgcagccctcatccggcccgtgggggcagtaaaccaccagccccacctcaccgccctgttcggccactaacgcgcgcaaacgcgcgtgcatggcctccagggtcgcgatgtcgtagtaaccgcgggcgatgccggactggttggtggcgatggctaccgtccagccggctttgctcaactgcgcgatggcctcgatcgaaccgggcagcggaatccactcctccaccgacttgatgtaagcgtcggagtcgtagttgatcaccccgtcccgatcgagaatcagcagtttcaacatggtcagcccagtacggagatgtcggcgatattgatgaacaagccacgcaggcgcgcgagcatggcgtagcggtttttgcgcacgccagcatcgtcggcattgatcatcaccgcttcgaagaacgcatccaccggctcacgcaaagacgccaggcgcgccaacgcttgcgcgtagtcacgctcagcgatcagcggcttcacggcgttctcggccttggcaatggccgagttcagcgagaactccttggcatcggcaaacaggcccgggtcgacttcagcagtgccaaggttgtcggccttgctcagcaggttcgacacgcgcttgttcacggcggccagggcatcggcttccggcagcttgcggaacgcttgcacggcttgtacacgctggtcgaagtccaacgccgagcccggttgcagcgcacgtaccgacaggtagacggaaacgtccacgccttcgtcttcataacgcgcacgcaggcggtcgaacacgaactccagcacttgctcggccaggccggcttgcttgaccttggtgccgaactggccgacggcgaataccacggcctgggtcaggtcgaggtccagcttcttgtcgatcaggatgcgtagcacgcccaaggcagcacggcgcagggcatacgggtctttgctgccggtgggcagcatgccgataccgaagatacccacgagggtgtccagcttgtcggcaatggccacggccgcaccggtcagggtgctcggcagttctgcaccggcaccgcgcggcatgtactgctcgttcagggccagggcgacatcatccggctcgccgtcgttgagggcgtagtagtaacccgccacgccttgcatctctgggaactcgccgaccatttcggtggccaggtcgcacttggacagcaagccggcacgggcggcccaggctgcgtcgccgccaatacgtggggcaatgtaggccgccagcttggaaacacgcacggccttgtcatagacgctgccgagtttttcctggaacactacgttctgaaggcgcaggttgaagtcttccagcttctgcttcttgtcttgcttgaagaagaactcggcgtcggtcaggcgcgggcgcacgactttttcgttaccggcgatgatctgctgtgggtctttgctttcgatgttggccacggtgataaaacgcggcaacaacttaccgtccacgtccagcaggcagaagtacttctggttgtcctgcatggtggtgatcaaggcttcttgcggcacgtcgaggaaacgctcttcgaacgagcacaccagcggcaccggccattccaccagggcggtcacttcgtcgagcaggcttggcggcacgatggcggtgccttcctgcaggcgggccagttcttcggtgcgcttgctgatcagctcgcgacgctcattggcgtcggccagcacataagcggcgcgcaggtcgttgaggtaattggccggcgaagtgatgcgcacgctttctggatgatggaagcggtgaccacgggaatcacgtccagccttctgggcgaggatggtgcaatcgatgacctggtcaccgagcagcatcaccagccattgggttgggcgcacgaactcttccttgcgcgcaccccagcgcatgcgcttggggataggcaggtcgttcagggaatcttcaacgatggtcggcaacaggctggcggtcggcttgccggtgatgacctggctgaaacgcagtttcgggccgctctggtcgatctcgctcagctctacgccacattttttggcaaagccaagggcggcttgtgtcgggttgccgtcggcatcgaaagctgcctggcgcggtgggccgtccaggttgatgctgcggtccggctgctgggtttccagcgcggtcagcagcacagccaggcggcgcggcgcggcgtagacttttttggcttcaaacttcaggccagcggtctgcaggcctttttcgataccggccaggaatgcatcggccagggtattgagggccttgggtggcagctcttcggtgcccagttcaaccaggaaatcttgagcactcattgtgcagcctccagcttagccaacacttcatcacgcaggtccggggttgccatcgggaagcccagcttggcgcgggccagcaggtaggcttgggcgacggaacgcgccagggtgcgcacacgcaggatgtattgctggcgcgcagtaaccgaaatggcacggcgggcatccagcaggttgaaggtatgggaggccttcaacaccatttcatagcttggcaacggcagcggctggtcgagctcgatcaggcgtttggcttcgctttcatagaagtcgaacagttcgaacagtttgtcgacgttggcgtgttcgaagttgtaggtggactgctccacctcgttctggtggaacacatcgccgtaggtcaccttgccgaacgggccgtcagcccacaccaggtcgtagaccgagtccacgccttgcaggtacatggccaggcgctccaggccataggtgatttcgccggtgaccgggtagcactcgatgccgccggcttgctggaagtaagtgaactgcgtcacttccatgccattgagccagacttcccagcccaggccccaggcgcccagggttggcgattcccagttgtcttcgacgaaacggatgtcgtgcaccagtgggtccaggcccacatgtttcagcgagcccaggtacagctcctggaagttgtccgggttgggcttcaataccacctggaactggtaatagtgctgcagacggttcgggttttcgccgtagcggccgtcagtcgggcggcgactgggctgcacataagcggcgttccaggtttccgggccgatggcccgcaggaatgtagcggtgtggaaagtgccggcgcctacttccatatcgtagggctgaagtaccacacaaccttgctcggcccagtattgctggagggcgaggatcaagtcttggaaggtacgcacggctggcgtaggctggctcacgaaattcacctgttacttgggctgcgatttaaagagcgggagtatacccgattcggccccgccaccactccctggagccttatgccacgctgcttttggtgttctgaagatccgctgtacatggcttatcacgatcaagagtggggaacgccgctgcgcgatgcgcagggtttgttcgagttgcttttgctcgaagggttccaggcaggcctgtcctggatcaccgttttacgcaaacgcgagcattatcgaaaggtgttgttcggctttgacgcgcagcgcctggcgcaattgagcgatgaagaaatcgaggtgctgatgcaggacccgggcatcgtgcgcaatcgcttgaagctcaacgctactcggcgcaacgccgcggcctggctggcgctggaggatccggtggggttgctgtggtcgtttgtcggcggcaaacccaaggtcaatcacttcaaggatcgcagcgacgtcccggcgattacgcccgaagccgaagccatgagcaaagccttgaaaaaggccggcttcaccttcgtcgggccgaccatttgctacgccttcatgcaggcctcgggcatggtcatggaccacaccaaggactgcgaccgttacgcggacttggtcaacgccggttagaatgccggctttgcgcaccacacacgatcaggagtgacctgtggaaaagtttaaaggcgccttgctggtaggtgctcttcggttgtttgccctgctgccctggcgcgccgtacaagccgtcggcacggggatcggctggatcatgtggaaaacccccaaccgttcccgcgatacggtgcggatcaacctctccaaatgcttcccggacatggacccggcagagcgcgagcgcctggtgggccgcagcctgatggacatcggcaagtccctcaccgaaagcgcctgcgcgtggatctggccggcgcagcgctctatcgacctggtccgcgaagtcgaaggcctggaagtgctgcacgaggccctggcttctggcaaaggcgtggtaggcatcaccagccacttaggcaactgggaagtgttgaaccatttctattgcagccagtgcaaaccgatcattttctatcgcccgcccaagctcaaggccgtggacgaattgctgcgcaaacagcgcgtgcagttgggcaaccgcgtggcggcctccaccaaggaaggcattctcagtgtgatcaaggaagtgcgcaaaggcggccaggtgggcattcctgccgacccggagccggctgagtctgccgggatcttcgtaccgttttttgccacccaggcgcttaccagcaagttcgtgccgaacatgctggcgggccacaaggcggtgggtgtgttcctgcatgccctgcggctgccggacggctcgggctacaaggtgatcctggaagcggcgccggaggacatgtacagcaccgacaccgcgacgtcctgtgcggcgatgagcaaggtagtagagcgttatgtcggcgcttacccaagccagtacatgtggagcatgaaacgcttcaagaaacgcccactgggtgaggcgcggtggtattgattcaccgctgatctcctagccaatggagatcaaatgtgggagctggcttgcctgcgatggcatcacctcggtttaactgatagaccgaggtgctgccatcgcaggcaagccagctcccacaggggattgtttcaagcctggcggtcgagttttttcaggaacactgccatctctttttcggcctgtttgtcgccgtgtgccaaggccgcctctatgcctttttcccacgcctgtcgtgctgaggcactgtcaccctgcgcctgatgcgccttgcccaacaacttccacgccgccgaatacttaggatcgaactcgacgcatcgctgcaaatgctcggccgccttggcgttgtccttcaggtccagataacccttgcccaggccaaagcgcagcagcgaattgtccacgcccttggcgagcattttttccagggactccagcatcggttcactccttgatcagaaaaagctcaaccccacgtggaacagcttctccacatcgcggatatgttttttatccacaaggaacaaaatcacatggtctccggtggcgatcaccgtgtcgtcgtgggcaatgatcacttcttcatcgcgaatgatcgcgccaatggtggtgcccggcggcaggccgatatcgcggatggccttgccaatcactttgctggacttcgagtcaccgtgggcaatcgcctctatggcctccgcagcaccccggcgcaacgagtgcacactgacaatgtcgccacggcgtacgtgggcaagcaaggtgccaatggtcgccaactgcgggctgatggcaatgtcgatatcgccgccctggatcaggtccacataggccgggttgttgatgatggtcatcaccttcttcgctcccaaccgcttggccagcaaggacgacatgatattggcttcatcatcgttggtcagggccaggaagatgtcggcgtcggcgatgttctcttccatcagcaggtcacggtccgaggcgctgccttgcagtacaacagtgctgtcgagggtgtcggacaaatgccggcaacgcgtcgggctcatctcgatgatcttcacctggtagcggctttcgatggcttcggccaaacgctcgccgatctgcccaccgccggcgatgacgatacgtttgtagctttcgtcgagcctgcgcatttcgctcatgaccgcgcgaatgttcgccttggcggcgataaaaaacacttcatcgtcagcctcgatcaccgtatcgccctggggcaggatcggccggtcacggcggaaaatcgcggccacgcgggtttccacgttcggcatgtgctcgcgcagctggcgcagttgctggcccaccagcggcccgccgtaataagccttcacggccaccagttgtgctttgccttcggcgaagtcgatcacctgaagcgcacctggaatttcgatcaggcgtttgatgtagtgggtcaccacctgttccggactgatcagtacgtccaccggaatggcgtcgttatcgaacagaccggcgcgggtcaggtacgccgcttcgcgtacccgagcgatcttggtcggggtgtggaacagggtgtgggcgacttggcaggcgaccatgttggtctcgtcgctgttggtcacggccaccagcatgtcggcatcgtcggcaccggcctggcgcagcaccgtcggaaacgacgcgcggccttgcaccgtacggatgtccagacggtcgcccaggtcacgcaaacgctcggaatcggtgtcgaccacggtgatgtcgttggcttcaccggccaaatgttcggccagcgtgccaccgacctgccctgctccaaggatgatgattttcatccggtcactcccttaaaaccattcagccgcgcgcggcggcgatcttgatcagtttggcgtagtagaagccatcgtgcccgccttcttgggcaagcagttggcgaccgtggggctgcttgatgccggccgtggtagcgaggtccagctcacgcgcgccgctggtgcgggcgaggaaggcttggatgacctcggtattttcggtgggcaaggtggagcaggtggcgtaaagcaggatgccgccgacttccaaggtgggccacagcgcgtcgagcagttcgccttgcagcaccgccaaggcggcgatgtcgtcgggctggcgggtcagcttgatgtccggatgacggcggatcacgccggtggccgagcaaggggcgtccagcaggatgcgctggaagggcttgccgtcccaccaagtggcggtgtcgcggccatccgcggcgatcagttcagcgctcaagcccaggcgtgcgaggttttcccgcacgcgcaccaggcgcttggcttcaaggtccaccgcgactacaccggccaggcctttttccacttcaaggatatggcaggtcttaccgccgggcgcgcagcaggcatcgagtacgcgctggccgggggcgaggtcgagcaagtcggcggccaactgcgcggcttcgtcctgcacactgatccaaccttcggcaaagcccggcaggctacgcacatcggcagccgcttcgagcacgatgccgtccgtgctgtacacacagggcgtggcgttgatgccagcgtccgccagtaactgcaaatacgcgtcacggctgtggtgaccacggttgacccgtaggatcatcggcgggtgcgcgttgttggctgcgcagatggcttcccattgctcaggccaaaaggccttcagggatttttgcagccaacgcgggtgggcggtgcgcaccaccggatcatgttccagctcggccagcagggcttcgctttcgcgctgggcgcggcgcagcacggcattgagcagggccttggcccagggctttttcaacttgtcggcgcaaccgacggtttcaccgatggccgcgtgggcgggcacgcgggtgtagagcaattggtagagacccactagcaacagcgcctcgacatccgcgtccgccgctttgaacggtttttgcagcagcttggcggccagcgcagacaaccgtggctgccaacgggcggtgccaaaggccaggtcctgggtaaacccccggtcgcggtcttcaactttatccaactgcgtcggcagcgaactgttcagcgaagccttgccgttgaggacggcggcaagagccttggcggcggccagacgtgggttcattgagtgaccaccccaagcgtggtgcccaaggcgaatttctcacgacggctattgaacaaatcgctgaagttcagcgccttgccgccgggcaattgcagacgcgtcaggcacagcgcttgttcaccgcaagccaccaacaggccgtctttgctggcgttgatgatctcgccgggagcgcctgcgccatcggccagggtcgcggtcaacactttcaaagcctcgccgttcagggtgctgtggcagatcggccacgggttgaaggcgcgtaccaggcgctccagctccacggccgggcggctccagtcaatgcgcgcttcgtccttgttcagcttgtgggcgtaggtggccaggctgtcgtcttggatttcgccttgcagggtgccggcagcgaggccggcgatggcctggatcacagcgggcgggcctagctcagcgaggcggtcgtgcaggctgccgccggtgtcttgggcggtgatcggcgtggtgaccttgagcagcatcggcccagtatccaggccggcttccatgcgcatcacggtcacgccgctctcgctgtcgcctgcttcaacggcgcgttgaatcggcgccgcaccgcgccagcgtggcagcagtgaagcatggctgttgatgcaacccaggcgcgggatatccagcacagcctggggcaggatcaagccgtaggccaccaccaccaacaggtccggcttcagcgcggccagttcggcctgggcctcggcgttacgcagggtcggcggctgcagcacaggaatgttgtgctccagcgccaactgcttgaccgcactcggcatcagtttttgcccgcgaccggccgggcgatccggctgggtgtacaccgcgacgaggtcataagggctggcaagcagcgccttgaggtgttcggcggcaaattcaggagtgccggcaaaaacaatgcgcaatggctcggtcatgggagttctcggttaaaaacagtcacaaaagaaaaaggcttgccgcagcaagcctttggaagaagggcatcaggcttgctggcgatgctttttttccagcttcttcttgatgcggtcacgcttgagcgtggacaggtaatcgacgaacagcttgccgttgaggtggtcgcattcatgctggatgcacaccgccagcaggccttcggcaatcagctcgaaaggcttgccgtcacggtccagcgccttgatcttcacgcgtagcgggcgttccacattctcgtagaactccggcaccgacaggcagccttcctggtattcgcccatctcttcggtcagcggttcgaactcagggttgatgtacacccgaggttcgctgcggtcttccgacaggtccatgaccacgacgcgcagatgcacgttgacctgggtcgcggcgaggccgatgcccggggcttcatacattgtttcaaacatgtcatcgaccaactgacgaaccttgtcgtccactacggccaccggcttggcgatcgtgcgcaggcgcgagtcgggaaattcgaggatgttcaaaatagccataagcgtaattgctgcacatgtgaggaagagacaaatcggcggtgggatggacccatacggccggtgtgaaacgctcggaagccgcgaaggccatggcatttcacgcgaacgcatataataaaggagattcaccccatgaggaaatcgctactcgtcttgctgctgtgggctccgttcgccacggcattgattgtgcaacccactgagcgtctggatcaggccgcgcaacaggccatccagcattttttactgcacaaccgtatttttgactccccccacgacctggacaacgcgccttacattattgcggcgcaaggcgggcgcgttctgggtgccaacgacgagcgtgtgcatgcgcgcgggcatctggacccggcccagccaagctacgggatatttcggcggggcaaggcctacaccgacccccatacccaagagctgttgggcatcaatgccgacgacatcggcactgcgcgctttgtgcttgccgacagcctcaccaccctggcagtgcaacgggtgacccaggaaattcgcccaggcgaccgtttgttgcgcgccgagcctcccgttgctttggccagcctggaaccctgcaaacctgcacccttgattacagggcatatcatcgacatccccaagggcgtcacgcagattggcgtgctcgacgctgtgaccctcaacaagggccgccgcgatggcttggtggaaggccaactgctcacagtgatcaaggctggcgccatcgtgcgagacgccctcaccggtacgcccactcccctcccggatgagcgagccggcaccctgctggtgtttcgcacctatgaaaagctcagctatgccctggtgctcagtgcttcacggtcgttggccgtgcaagaccgtttcgagacggctgatcaagcgcaataaatagcctgctaaataagttaccaacagagttatccacagcttgttccggtcaaggatgatcatatgaatccgataaacagtagcgatatttccccggcagagctggaagcccggctacgcttgcacaggctgccagaactggggcccaagcgttttcacgtgttgatcgatgcctttggttgcgcttccaaggccctgagtgctcccgccagtgcctggcgttccctcggtttgcccgccatcagcgcagaggcccgacgtagccccaaagtccgtgacggtgccagtgaggcgttggcctggctggcgcgcccggcccagcatttgctgatgtgggaccacccggattacccggcgttgctcgcgcagatcgacgatgcgccgccgttgttattcgttgcgggcgaccccgatattctggaaaaaccacagttggccatggtcggtagccggcgtgcctcgcgcccgggcatggacacggcagcggccttttcccgcagcctggcgagcgccggttttgtcatcaccagtgggctggcggtgggcattgatggcgcggcgcaccaggcggcattggacgtgggcggccataccatcggcgtgcttggcactggcctggaaaatttttatccacagcgccatcgcaagcttgctgcggcgatgatcgcccaaggcagcgccgtggtttccgagtttccgctggataccgcgccccaggccggtaatttcccacggcgcaaccggatcatcagcgggttgtcgttaggcgtactggtggtggaggccagtatcgccagcggctcgctgatcaccgcacgcctggcggcggagcaagggcgcgaggtgtacgcgattccgggttccattcaccaccccgccgccaaaggctgtcatcaactgatccgtgatggcgcggtgttggtggaaaccatcgagcacatacttgaaggcttgcgtggttggcagcggttgtcccatgcggcaccggtgcccgtaacccatccgctggtggcgctactgcacgcggcaccgcatagcagcgaagccttggcgattgccagcggtcggccgttgtcacaagtactggccaccctgacggagctggagttggagggccaggtgatttgcgaaagcgggcgctggctggcgcggtgtccgctttggtagtggcccgtttttggcgctaggttttgtaacgaagatcggtaaactgcccagagctttagtccggagagttaacaatggtcaacaggtggcgtgtgctggaagccgcacgggaaattcgcgcaggcgcagtgatcgcctatccgaccgaagcggtctggggcctgggctgcgacccgtggaacgaagaagcagtggatcggctgttggcgatcaagaaccgctcggtcgacaaaggcctgatcctggtggcggacaatattcgtcagttcgactttctgtttgaggatttcccggacacgtgggtcgaacgcatggccagcacctggccagggccgaatacctggctggtgccccatcaagacttgctgcccgaatgggtcacgggtgtgcacgacaccgtagcgctgcgggtcagtgatcatccgttggtgagagatttgtgcgccgaggtcggcccgttgatttccacctcggccaaccctcagggccgcccggcagcccgcacgcgcattcgcgtggagcagtattttcgcgggcaagtggacctggtgttgggcggcgccttgggtgggcgcaagaacccgagcctgattcgggatctggtgacgggtgatgtggtgcgcccctcgtaggtgcagctcgttcccacgctctgcgtgggaacgccgcattggacgctctgggtccgcttgtgacgcagagcgtcacggtatgcattcccacgcagagcgtgggtacgatcttaaggcagcaggatggtcgatccagtcgtgcgccgccccgacaactccgtctgcgctttggccgcctctgccagcgagtagcgctggttgatatcaatgcgtaccttgccactcttgatcatcgaaaacagatcgtccgccatcgcctgcaggttcgccggattgtttgcataggtcgccaaagtcggccgggtgacgtacagcgaacccttcgccgacagaatccccaggttcaccccatccaccgcacccgacgcgttgccgaagctcaccaccagaccccgtggcgccacgctgtcgagtgaggtcagccaggtgtccttgccgacgccgtcgtacaccaccgggcatttcttgccgtcagttaattccagtacgcgttgtgcgacatcttccttgctgtagtcgatggtttcccaggcgcccagcgatttggccaaagcggctttttccggggagctgacggtaccgatcaacttcacccccaaagccttggcccattggcaggccagggagcccacgccaccggcggcggcgtggaacaaaatggtttcaccgcctttgagctcataggtctggcgcagcaggtactgcacggtcaggcctttgagcatggcaccggcggcctgttcaaagctgatctcatccggcaggtgcaccaggttggcggcgggcaacacgtgcgactcgctgtaggcacccagcgggccgctgccgtaggccacacggtcgccgactttgaattggctgacttcactgccaacggcatcgactacgccagcaccttccgcacccagacccgatggcagggccggcggcgcatagaggccactgcggaagtaggtgtcgatgaagttcaggccgatcgcctcgttgcgcacccgaacctgctgtgggccaggttccgctggcgtgtagtccacatattcaagtacgtcggggccgccatgggcgctgaactggatacgtttggccatctgcacttctccttgggttcgaatctgcgtagccccctatcggactcctaagcttgatcttcgtcaactgccgcgcacctaagtgcagtggcatctaagcgcagtggtatcctgtgcgcccatttgccgccgacgccccatgggcctcgcgtagctttgcccgattcaaggtgatgccatgactacccgcaccgaggccgttaaagcctacctgcttgacctgcaagaccgcatttgcagcgccctggaaaccttcgagacggacactcgctttatcgaagacgcctggacccggccagccggcggtggcggtcgcacccgtgtgatggaaaacggttcggtgatcgaaaaaggcggcgtcaacttttcccacgtgttcggcagcggtttaccaccgtctgccagtgcccatcgccccgagctggccggccgtgggtttgaagcgcttggcgtgtcactggtgatccatccgcataacccgcatgtaccgacttcccacgccaatgtgcggtttttcatcgctgaaaaagaaggcgaagaaccggtgtggtggttcgggggtggcttcgatctcaccccgtattacggcaatgaagaagactgcattcactggcaccgcgtggccgagcaggcctgtgcgccgtttggcccggatgtgtacgcacgctacaaggcctggtgtgacacctacttccacatcaaacatcgcaacgagccccgtggcatcggtgggttgttcttcgatgacttgaacgagtggggcttcgacacctgcttcgccttcatccgtgccatcggcgatgcctacatcgacgcctacctgccgattgtgcagcgtcgcaaggccatggcgtacaccgagcaacagcgccagttccaggagttccgccggggccgctacgttgagttcaacttggtctatgaccgtggcaccctgttcggcctgcaatcgggcgggcgtacggagtcgatcctgatgtcgctgccacctcaggtacgctggagctacgactggaaggccgaagccggcagcgaagaggcgcgcctcaccgactacttcctgcaagaccgtgactggctcggcgttgccgcgcccaaggcggcggtgtgatggaccgttatgtcgtgttcggcaaccccatcggccacagcaaatcgccgctgattcaccgtctgttcgccgcccagaccggtgagcagctggactacagcacaatgctcgcgccgttggaggacttcaccgcctgtgcccgagagtttttccaacagggccggggcgccaacgtgaccgtgccgttcaaggaagaggcctatcgcctggccaataccctgaccgaacgagcccagcgcgccggtgccgtgaacaccttgagcaaactggctgacggcaccttgttgggcgacaacaccgacggcgcgggcctggtgcgcgatttgacggtcagtgccgggctggccctgcaaggcaaacgcattctgttattgggcgccggtggcgcggtacgcggtgcgctggagccgttgctggcgcagcaaccctcgtcgttgatcatcgccaaccgcaccgtggaaaaagccgagttactggctgagctgttcgatgacctgggcccggtgtctgccagtggcttcgactggttgcgtgagccggtggacgtgatcatcaatgccacgtcggccagcctgtcaggcgatgtaccgccgattgccggcagcctgatcgagtcgggcaagaccttctgctacgacatgatgtacgccaaggaacccactgcattctgccgctgggcgagcgagcaaggcgcggcggtggcgatggatggcctgggcatgctggtggaacaagcggcggaagccttcttgctgtggcgtggtgtgcggccggattcggcgccggtactggccgaactgcgccggcaattggcctgattccacactctgatgtgggcaccgttaatgtgggagctggcttgcctgcgacagcaataggtcagttacccatgtgctggctgacccaccgctatcgcaggcaagccagctcccacagttttgatcgggttcagtcttcaaagtcgatggggcagttatcgggcccgtcgagctttttcagctcatcaaccacctgcggcctggccccacgcaacgtcaagctacgccccaaccccgccaaccggcgcgcctcctgatgcagcatctccaccccggaatagtcgataaagttgatctgctgcgcctcgatcaccacccgctcgccctgcaagcgctgcaggcgcacttgcaggtaatggctggcgccaaaaaagatcgagccgcccacccgcaacacatccgcctcaccgtcgcgccagtgttgaacccgtggctgcgacgtgcgcttgaggtagaaaaacagcgacgccagcaccccggcatagatggccgtttgcagctccaacaataaggtggcgacgcaggtcaggctcatcaccacgaattcggcacggctgacccggaacagcgcgcgaatgccgcggtggtccaccagcccccagcaaatcagcaggatgctcgccgccatgctcgggatcggaatatgcgcgatcaacgctgcgccaaataacgcgaataacgccacccacagggccgaaaacacccccgccagcggcgaacaggcgcccgcctcgtaactgaggcccgagcgggtgaatgatccggctgacaggtagccggaaaaaaatccgccgacgatgttggataaaccctgggcgcgaacttcctggttggcgtcgagcagttgttgcgagcgggccgacagcgagcgggcaatcgacaggctggtcaccaaccccagcatgcccacagccacggcactgggcagcaggcgcagcaccaggtccaggtccatcggcaacgggctgaacggcggcagtttgccgatgaacgaactgacccgtgccacatgcccgaacatcgccggccacaaccatgccaccaggctgcccagcaccaaggctatcaacagtgtgggccagcgtggcaccaggtacttgagcaacatgcctgccagcaacgtccccagccccagggccagggatgcctgatcccactcgccacgatgatcgatcagcgccagtagaccgttgatggccgtggcctggctgggcaaatccaacccgagcaggttgggcagttgccccagggcaatcaccacagcggcgcccagggtgaaacccagcaccaccgaatgggagacaaagttcaccagggcgccgaagcgcagcaggccgagcaaccactggaatacgcccgcgaggagggtcagcaacagaataagggtgatgtagtcctgggagccgggcacggccaatgggctgacgctggcgtaaagcacgatggagatggcggccgtgggcccgcagatcaggtgccaggacgagccccacaggcaagcgatcaataccggaatgatggcggcgtagagcccgtattcgggtgggagacctgcgatcaatgcgtaggcaattgactgcggcagcgcaagcacggcgccgctgaggccgacgatggcatcccggccgacgctggcgcgggtttggcgcggcagccagcgcaggaagggcaagagtgtatggcgggtgggccggggcatcgcaggctcgggtaaagggttttggcaagagtatcaatatgcatgggtacgtgtgggagctgggttgcctgcgatgctggcgcctcggtgcgacaggcataccgggatgatgctatcgcaggcaagccagctcccacagggggcagcggcaagcgtcagagtttggcctttaccgccggcaacgcctcctggccatccagggttttcacgccctccagccactggtccagcaccgccgggttggccttgatccacgccttcgccgcctgcgcattgctgaccttgttgttggccacgtcggccatgatgctgttctccatggcctgggtgaaactcaggttggtcagcagtttcccgacattggggcaggcttgtgcgtaacccttgcgggtcagggtatacacgctgccggtagcgccaaagtactgctcgccgcctttgaggtaacgcattttcagttgcacgttcatcgggtgtggggtccagccgaggaaggtgatgaaacgctgtttcttcaccgctcgcgagacctctgcgagcatcgcttgttcgctggactcgatcagcttccattgccccaggtcgaagtcatttttcttgatgatctcctgcaaggagatattggccggcgcgccggagccaatgccgtagatcttcttgtcgaacttgtcggcaaacttgttcaggtcggcgaagtcatgcaccccggcttcccacacatagtccggcaccgcgagggtgaactcggtgccctccaggttcttcgccagttgcaccacatcgccgttggccacgaacttgtcgtagaagccttgctgcgccggcatccagttgccgaggaagacatccacctggccgtctttcagcccgccgaaggtgatcggcaccgccaaggtgtcgaccttgggttggtagcccatgcccgtcagcaagaaactggtgatggcgttggtggcggcaatgtcgctccagcctggatcggccatcttcaccgtttcgcagcgagtgtctgcgtacacctgggcgctgctgagcaccaccaaactcagtaccacggtcaacttttgcatggccttccctctgtctacttattggttttggcagggttgtggaaaacgtgccttgcgctccaggtcatcaaggtcgatatggttgcgcatgtactgctgactggcgtctaccagtggctggtgatcccagctcttgagtttgccttgggtcagcgcttcaaacaccaggcggcgacggcgttggctggcgagcacctgttgatggatcgccgggatgtcccatttagcccgcgcttcacgcaagaacgcctcgaacaacggacgatgttcggcgcactggctgaggttttcctgctcgcgcgggtcgttgtgcacatcgaacaacaagcaagggtcgtcttcgctgtagatgaatttgtaggcgccccggcgaatcatcatcaacgggcttatggtgccttcggccatgtattcgccaaacacttcgtcatgcccgccctgccctagcaagtgcgggaccagtgagcggccgtccagcggcaagtgcgggtccagttcgccaccggccaattccaccagggtcggcaacaggtcggcggtcgacacggcttgagtgactcgaccagcggcgaactgacccggtgcactgaccagcagcggcacgcgggcggccatttcaaaccagtgcattttgtaccagaggccgcgctcgccaagcatgtcgccgtggtcgccggagaaaatgatcagggtgtcggcggccaggccggtgtcttccagggtctgcagcagcttgccgacgttgccgtcgatgtagctgcaggcgccgaagtaggcgcggcgggcgtcgcggatcttatccaccggcagcggtttgtcccacaagtcatagaccttgagcagccgctgggaatgcgggtcaaggtcggcctggggcggcgtcgcgggcattggaatctcggtgtcggcgtacaggtcccagaacggcttgggaatggtgtacgggtcgtggggatgggtcatcgacacggtcaggcagaacggctggtcgccctcctcgcggatgtgatcaaacagatattgctgagccttgaacaccacctcttcgtcgaaatccagctggttggtgcgcacacacgggccggcttgcagtaccgaggacatgttgtgataccaggtagggcgtacgtctggttcgtcccagttcaccgcccagccatagtcggcggggtagatgtcgctggtcaggcgttcctcatagccgtgcaactggtcggggccgcagaagtgcatcttgcccgacagcgcagtgcgatagccgaggcgacgcaggtagtgggcataggtcggtacatcggcggggaaatcggcggcgttgtcgtaggcgccgatcttgctcggcaattggccacttaccaaggtgaagcgcgacggtgcgcacaatgggctgttgcaataggcggcgtcgaacaccacaccttgtgccgccaggcggctgaggttgggcagcttgatcggggaaggcccgtagaacggcagcatcggcgcggccatctgatcggccatgatgaaaagaatgttcttgtgcttcatggtttctcggcattccataggcggtgtttatgcgaatgagcatgcggtccatcaatacatgggtaaagcccatacgcggcaatgactaggataagttgagcttatgtatgaagcgctgggtgacctctctctcgatttgctgcgcgcctttgaggcagcggcacgccatcgcagtttcaccgctgccgcgatggaactgggcaccacccaaccggcggtcagccagcagatcaaacgcctcgaagagcaactggcgatccgcctgtttgaccgcatttatcgcggcattgaactgaccgacgctggcgccctgctgttcgagcatgtgcaaggcggcctgcagaacatcaaccagggcctcggcgccattactcaacaaagccagcatgaagtgctgcaagtcgccactgacttcgccttcgctgcctattggctgatgccgcgcctgcatcgcttccaccaggccaacccgcaggtggatgtcagcctggtcaccagtgagcgcaaccacgccactctgcgcagcgatattgatgtggcggtgttgttcggcgatggccgtttcaagcagggcgagagcctgtggttgttcaatgaggaggtgtttccggtgtgcagcccgcagtggctcaaggagcaagctgcgcccctgacggtgcagaccttgcaaggctgcccgttgctgcacctgcgccaggaaaacaacagccagtggttcgactggaacggcgtattccgcgaactgggtatcaccgctgcgccgacccctgggcaattgcgcttcgacaactacaccttgctgatccaggccgcgattgccggccagggtgtcgccatcggctggcgccacctggtggataacctgctggagcagaattggttgtgccgaccgatcagccccacggtgacgtcgcgatttggctattacgtggtgcagccccagcgcaaacgccgtggtcagttggtggaccgctttgtcgagtggctggtggcggaacaggccagcagtgcgcagtcgttgaccgggctggccctgccgtcgattgcggtctaggatcggcgcacagtggaaccggagtcagtcatgcaacgtatcaagggctaccacgcccatatctacttcgacgccagtacgatcgagcaggcgcgcacgctctgtgaagacgccgccaggctgttcccgttgcgcatgggccgcgtgcatgagcggccggtgggcccgcacccggattggagttgccaactggcgttcgagccggaatatatcggcgtggtattgccgtggctggcgctgcatcgcaatggtttggtggtgttcctgcacccggaaaccggtgatgacctcaaggaccacaccgattacgccatttggatgggtgcgatgcgcgagctggacctgtcgattttttaagcgttcttacccggttaacccgcgtctttccctaagtaaaaacaggaagagttgtaggatttatcttgccttttctcattatatgggattgatatttatatattgagatgttctgcgccgtaggtttatattcgcccatctgcttttttcagcacccactcatttcaggtgaagcgatgcaggcgcaattgatcgcgctcgattgggggaccagctcccttcgtgcttacaaactcggccccgcgggcgttgtgctggaacagcgctcgctggctaccggcatcatgcacttgcccacagagcctcgggaaattgccggtgtgctgtgcaccgacggctttgaactggcgttcgatagcgcctgcggcgattggctcgacgcccagcccaggctgccagtgatcgcgtgcggcatggtcggcagcgcacagggttggagcgaggcggcctatcgcagcacgcctgtggatgtcgccagccttggccaggcgttgcatggcatacgcagcctgcgcggggtgcaggtgcacatcgtgccgggggtgatcgagcaagtggggctgcccaatgtgatgcgcggcgaagaaacccaagtgctcggcgtactgcaagggcttgggcccaaggtgctgatcggcctgcccggcagccattccaaatgggtcgaggtggtggaaggccgcattacccatttcgataccttcatgaccggcgaagtgtttgcggtgttgagcaagcacagcattctggggcgcacccaacaggccagcgaacagttccaggccgaggcgtttgatcgaggcgtgcacgtggcgctgtccaacgacggccagcgtggcgtgctctcaaccctgttcagtgcccgtacccttgggctcactgcgcagctggcgcccgaccagcaacccgattacctgtccggcttgctcatcggccatgaactcgtcggcctgccagattccgccaaacaccagccgatcatcctggtcggcgctgctccactctgcgcccgctatcaacgcgccctcgccctttgcggctttgcccacgtcagcctggcgcaagaagccaccgagcgtggcctgtggcaactggcgcaagccgccgggcttactcgacctttactggaggcctgacatgctcaagcaagcactcgcacaaaacggtttgatcgccatcctgcgcggcctacgccccgacgaagcccaggcggtcggccaagtgctgtacgacgcgggttttcgcgtgatcgaagtgccgctcaactcgccagacccttacaccagcatccgcaccctgcgcgacagcttgcccgccgattgcctgatcggtgctggcacggtgttgacgcctgagcaggtcgagcaggtcaaggcggccggaggccaggtgatcgtcatgccccacagcgatgccaaggtgttgcgtgcggccaaagcggcgggcctgtatttgtcccctggggtagccacgcccaccgaagcctttgccgcactggccgaaggcgccgatgtgttgaagctgttcccggccgagcaaatgggcccttcagtgatcaaggcatggctggcggtattgccggcgggcacgttgctgctgccggtgggcggcatcaccccggacaacatgcaggtgtttaccgacgccggcgccaagggcttcggattgggttccgggctgttcaagccgggcatgacagtggatcaggttgcgagccgtgcccaggcgtatgtcgccgcctggaaagccctcggctgagagcacattccgcgcccacaggcgctgcatctataagagagacaagagatgaaaatcaccaaactgacgacctttatcgttccgccgcgctggtgcttcctcaaggtcgaaaccgaccagggtgtgaccggctggggtgagcctgtggtcgagggccgcgctcacacggtggccgctgccgtcgaagaactgtccgactacctgatcggcaaagacccacgcaacatcgaagatatctggaccgtgctctatcgcggcggcttctaccgaggcggcgcggtgcacatgagcgccctcgccggcatcgaccaggcgttgtgggacatcaagggcaaggccctcggtgtgtcggtcagcgatctgctgggcggccaggtgcgcgacaaaatccgcgtgtattcatggatcggcggtgaccgccctgccgacaccgcccgtgctgccaaagaggcggtggcccgtggcttcacggcggtaaaaatgaacggcaccgaagaattgcagtttgtcgacagcttcgaaaaagtcgacctggccctggccaacgtcgctgccgtgcgcgatgcggtcggccctaacgtggggatcggcgtcgacttccatggccgggtgcacaagccgatggccaaggtgctgatgaaagagctcgacccgtacaaactgatgttcattgaagagccggtgctcagcgaaaactacgaagcgctcaaagaactggcaccgttgaccagtacgccgatcgccctgggcgagcgcctgttctcgcgctgggatttcaagcgcgtgctcagcgaaggctacgtcgacatcatccagccggacgcctcccacgcgggcggtatcaccgaaacccgcaagatcgccaacatggccgaagcctacgacgtggccctcgccttgcactgcccgctgggcccgattgccttggcggcgtgcctgcaactggatgcggtttgctacaacgcgtttatccaggagcagagcctgggcattcactacaatgaaagcaacgatctgctcgactatgtgcgagacccgggcgtgttcgactatgaccagggctttgtgaagatccccaacggcccgggtttgggcattgagatcaacgaagagtatgtggttgagcgcgcggccatcggccatcgctggcgcaacccgatctggcgccatgccgatggcagctttgccgagtggtgatttccacctgattgaaacgcgctaaaaaaggtgggagctggcttgcctgcgatggcggtgggccagtcaccgcagcggtgccagtcatgccgccatcgcaggcatgccagctcccacattgagcgcgttccttcctcaacaaatataaaaagaggcacccccatgcaccctgaatccctcaccgggcaggcttctttagtcacgcctagcagaaagcgctttttcatcatggtgctgctgttcatcaccgtggttatcaactacctcgaccgcagcaacctgtcgattgccgctccggcgctgaccagcgagctggggatcgacccggtgcaagtcgggctgattttctctgccttcggctggacctacgccgccatgcaaatcccgggtggctggttggtagaccgggtgccgccgcgcattctctacacggcggccctgctgctgtggtcgattgccaccgtaatgctcggtttcgccgccagctttatcgcgctgttcgtgctgcgcatggccgttggcgcgttggaggcaccggcctatcccatcaacagccgcgtggtcaccacctggtttcccgagcgcgagcgcgccacggctatcggcgtctacacttctgggcaattcgtcggcctggcgttcctcaccccggtactggcgtggctgcaacatcagtacggctggcacatggtgtttgtggtaaccggtggcgtcggcatcctatgggccgcgatctggtatgcggtgtaccgcgagcccaaagacttcaaaggcgccaacgaagctgaaatccaactgatccgcgacggtggcgggctggtggacatgcaggctaaaaccatcaaggcacccttcagttggacggacctgggcatcgtgctgagcaagcgcaagctgtggggcatctacctgggccagttttgcctgaactccacgctgtggttcttcctgacctggttcccgacgtacctggtgaaatatcgtggcatggactttatccagtctggcttgctggcctccttgccgttcctggccgcgtttgtgggcgtgctgtgttcgggggtgttttccgattggctgattcgtcgtggggcgtcggtgggctttgcgcgcaagttgccgatcatcagcgggctgctgatttccacggcgatcatcggggccaactatgtggactcgacggggtgggtcatcgcgtttctggcggtggcgtttttcggcaatggcctggcgtcgatcacctggtcgttggtgtcgaccttggcgcctgcccgtttgctggggctgaccgggggcgtgttcaacttcattggcaacctggcggcgattgccacgcctatcgtgattggttttctggccagtggctcatcgtttgcgccggccattacctacattgcagtactggcgttgcttggcgcgctttcctacatattgctggtcggcaaagtcgagcggatcgagctgtaaaaaggggcgacctgcgggtcgcccttttttcgttctacggcaccgacatctcgttgcgaaatacattgcgcgggtcccagcgctgtttggtacggcgcaagcggctttcgatcatcaggtcgggaaagaatattttgtaccactgggggtttttgccgttggccggattaccccctgcgtaagtcatgtcgaggtcggggtaattgatgtagcagccttcgaacgcgttgttgagcggtacaccttgagcatccgcaaacgcgttgaagtacagccctcggatccagtcagcatgggcttggtccgcggcggcgctgtcgccgcgccagtaacactgaggttgccacttgaggaaggacgaacgctgggcggccgacgactccttgcgcactggcgcactggcggcgttgatctggccgccgaaggactgaatctggatcaggctttgtgtcaggtggttgtcagggtctggccatgtcagggtagtccagatggcctgtagcacttgagggctgaactcccctttctggtaggccgacttatagcgcccacgctggttgtctcccgaaccattcaatgtttgctggcacaccagccaatccaggcgccgcgccgcagcctgggcggatgacactgagtcgatggggcgcccgcgggctgtgccaggcggcaaatggaccacatgaaacggcaccagcgactcggtagcgggtaagccgatggccgtgagcatcttttcgacaaaatcatcaaacggcgcgcggtcgttcagttcgccgtccttatccacataatggaagcccagcgtgatattgcctgtgtgctgatggcgcatttccagcttggtcgccaggccccaggtatctgggttgctctgatggctggaaaaccacagctggtaagccaccagcaagctttcgagtgcatcctgggtcagtattgaccagtcccattccaacaccagccacagcacctctttgggggccggtggcaggtccttgaagtaataactggtgataatgccgaattgaccacccccagcaccgcagcacgcggcgaacaggtccaattcgtcctgttgggtgctgtccctgctgacatggcgcggttcgagccctttgccttggctgtcaggcaccaggatgtcgaccccgctgagccagtcacacaccagtccatacttgcgcgacagcagaccgtagccgccgccgcaaatgtgcccgcccaatccgaccgaataacaggagcccccgggcaaggtcttgttggcccgcttgtacaactcgctatagctgtcccagatctggctgccggcctccaggcgaaagcggtagcgaaagggctgcgtcgggctcagttcggaaccgatctgcccgctggcgtcgtacaccacttggctcagcgcgctgatatccaggatcgacagcatctcatccgggctgtcgggcatcttgttggcgacaaacccctcatagcagtgaccgccgctgcgtacggtgatgcgtccattgggcagggccaatgcctgggcggcggcgtccatgatgtcttgggggctgcggcacaggtaaaccaggttggcgccattgggcgaagactggccctgcacatttcccaagggccagcgcagattgaaacccttttgcagggtggagtggcgacggtctgaaacagtgacgagatcaaatgccatgatgtactccttaaagagacaagaatgacttctgatgcggctaacttaacgaccgaggggcaaggactgcggggcttgcgaaggtggttagacggcaaagggcacgaagtgcgttaaaaaggagagacgcgatgcctagccttgtgtaggagcgagcttgctcgcgaaaaacgtcaacgataacgcgtgctcgctgaatgaacgcggcgcctgtaagtttttcgcgagcaagctcgctcctacacattaggcgagatgcctgcccccttttgaagcctagcgtataaatcggtgatgtttgaacagtccgatcaccgaccgaacaggcagttacttgcgtgcgttgcgcacaccttccgacagcgccgtgcacagcgtcagcacgccatcaatggcttgctggtcgttcttggccgtggcgatgtgatcgatcagcgccgaacccactaccaccccgtctgccaggcgtgcgatggccgctgcctggtccggcgtgcggataccaaagccgatgctgatcggcaggtcggtatggcggcgcaggcgggtcacggcttcttcgacgtgttccagggtggcggcaccggccccggttacaccggcgaccgacacgtaatacacaaacccggagctgccattgagcacagtgggcaggcgcacgtcatcggtggttggcgtggtcaggcggataaagtcgatgcctgcagcctgggccgggtcgcacagctcgccattgtgctcaggcggcatgtccaccacgatcaggccgtcgacaccagctgccttggcatcggcaatgaactgcgacacgccatatttgtggatcgggttgaaataacccatcaacaccagcggggtgtcgttgttgtcctggcggaactcgcgaaccatctgcagggttttcaacaggttctgcttggcgcccagagcgcggatattggccagttgaatggccgggccgtcggccatcgggtcggtgaagggcatgcccagttcgatcacgtcggcgccggcggccggcaagcccttgaggatcgccagcgaagtgtcatagccggggtcgccagcggtgacgaaggtcaccagggcggcgcggttctgttctttgagttgcgcaaagcgggtttgcaggcggctcatcagtgtttctcctgcttggactgttccatatggtgcatcacggtctgcatgtctttgtcgccacggcccgagaggttgaccaccatcaggtgatccttgggcaggtttggcgcgcgcttgaatacttcagccagggcgtgggcgctttccagggcaggaatgatcccttccaggcggcagcatttgtggaaggcttccaaggcttcgtcgtccgtcaccgaggtgtactggacgcggccgatgtcatgcaaccaagcgtgttccgggccgatgccggggtagtccaggcctgcggaaatcgagtgggcgtcgatgatctggccgtcgtcgtcctgtagcaggaaggtgcggttgccgtgcagcacgccgggaacgccgccgttgaggctggcggcgtgcttgccggtttcaatgccatggccggctgcttcaacgccgatgatttcgacgctggtgtcatccaggaacgggtggaacaggcccatggcgttggaaccgccgccgatgcacgccaccaggctgtccggcaggcggccttcctgggcttgcaactgggtacgggtttccttgccgatcacggcctggaagtcgcgcaccattgccgggtatgggtgtgggccggccacggtaccgatcaggtagaaggtgctgtcgacgttggtgacccagtcgcgcagggcttcgttcatggcgtctttgagggtgccggtgccggcgaccacagggatgacttcggcgcccagcagcttcatgcggaacacgttggcctgctggcgctcgatgtcggtggtgcccatgtagatcacgcattgcaagccaaagcgcgccgccacggtggcggtggccacgccgtgcatgccggcgccggtctcggcgatgatgcgttttttgcccatgcgccgggccagcaggatctggccgatgcagttgttgatcttgtgcgcgccggtgtggttgagctcttcgcgcttgaggtagatcttggcgccgccgcagaactcggtgaggcgttctgcgaagtacagcgggcttgggcgcccgacatagtcgcgctggaagtaagccaattcttcgttaaacgccggatctaccttggccgcttcgtattcgcgggccaggtcgaggatcaacggcatcagggtttcagcgacgtagcggccaccgaacgcaccaaacaggccgttggcatcagggccgttgcgtagatcggtctgggactgagtcatgggacgctccaggaaagaatgtgtttaaaggcaatgacggtcactctacgcgtgacgccttggcctgaaaaccgataagatcgccgcaacctgtcaggaaaactcacagatgagccgcgacctccctcccctcaacgccctgcgcgcttttgaagccaccgcccgcctgaacagcgtcagccaggcagcagagctattgcacgtgacccacggcgccgtcagccgccagctgaaagtgctggaggagcacttgggcgtgagcttgttcgtcaaggacgggcgcggccttaaactcacagatgcgggggtaaggcttcgcgacgcgagcgcggaagctttcgagcgtttacgcgacgtgtgcgccgaactgacccagcgcggcgccgatgcacctttcgtacttggctgttccggtagtttgctggcgcgttggtttatccctcgcctggggcggttgaatgccgacttgccggatttgcgcctgcacctctcggcgggcgaaggcgatctggacccgcgccgccccgggctggatgccttgttggtgttcgctgagccgccgtggccagcggatatgcaggtgtatgagctggccagcgagcgtatcggcccggttatgagcccacgcttcgccgattttgaacagctgcgccaggctccggcgtcggcactggccgagcaagccttgctgcacaccacttcaaggccgcaggcctggcccagttgggcacggcaacacggcatcgagcccggcgcgttgaaactcggccaggggtttgagcatttgtattatttgctggaagcggcggttgccgggttgggcgtggcaattgcgccagaaccgctggtggcagaagacctgcgagcgggtcgcctggtggcgccgtgggggttcagtgaaaccccggcgcacctggcgttgtggctacccaagcgcgccgcagatgggcgcgccgggcagttggcgcaatggctcaaggctgagctgttgcgccaaccgatgtaaccggtcaatcagtcaccgcgcttgcacagcaggtaagccgccagcaggcccagtgcgccaacggcgacgccagcggtcgtccatgggtgctcttgagcgtagtcacgggtggcagcgctggtttcacggattttgactttgctttcttcgtaggcgtcgctgatcaggtgacgagagtgcttgagcgcgttctcggcattgcttttcaaggccttcagcgttttgcgcgactcatcggacgcgtcgtccttgaggctctccagagatttgagcaggctcgaaatctcggcttccatgctttccagcgacgctttgcgtaaagaagtgttggccatgtggacatctcctgaagtgattgagtggcgtgtgtagataccgactgcgccggtttcagaaagtgcagtaattctgaactttcgcctcccaacggtcgcctgaagcagtacgcacattcgctgctagtcttgattgacgacctataaggagaaacgccatgagtgatcatcacacgtacaagaaagtcgaactggtaggctcttccaccaccagcatcgaagacgcgatcaacaatgccctggccgaagccaacaaaagcatcaagcatctggagtggtttgaggtgaccgaaacccgtggtcacatcaaggatggcaaggctgcgcacttccaggtcacgctcaaagtgggattccgcattgccagtagttgatcggcagagttgaactttgcccgctggccgattgccataacctgcgctacaaacaacgggtgccgacgcgatgagcgtcggcacgctctttttgatcagcgcaaggaaagtaacggatgaagacgtttctgttggcggtagggttgttgagcattgcgggtaccgctatggcggcgggcaagccttgtgaagagctgaaaagcgaaattgccgcgcaaatcgacgccaagggtgcttcggggtattcgctggaagtggtggacaaaggtgctacgccaagtgaccacacagtagttggcacttgcgaaggtggaaccaaggaaattgcctacaagcgcggttaatctcgtgttgtggatataaaaaccgacgcaagtgcgtcggttttttcgcctgaatttcagcccttcatcacttgtgcaagcagctcgtaggaatgaatccgatcggcgtgctcgtacaggtcactggtaaaaatcagctcatcggcgccggtctgctcgatcaacacctccagcttgccgcgaatcttcgacgggctgcccaccatggccaggccgaggaagctgccaaccgcgtctttttcatggggcaaccacaggccgtccatggttttgactggagggcgctgcaccaggctctggccgcgcatcaacgcgagaatacgctggtacaccgaggtggccaggtaatcggcctgctcatcggtgtcggccgccaccagcggaatgccgagcatcacgtagggcttatccagcacggctgaaggcttgaagtgattgcgatacacgcgaatcgcctcatgcatcaagcgcggtgcgaaatgcgaggcgaaggcgtaaggcaagccccgctcaccggccaattgcgcactgaacaggctcgaacccaacagccacaccggcacattggtgccggtgcccggtaccgcgataacccgttggtcgggcgtacgtgggcccaggtaggccatcaactcggccacatcttcggggaagtcatcggcactgccggagcgttcacggcgtagggcgcgggcggtcatctggtcggaaccgggggcgcgccccaggcccaggtcgatacggccagggtagaggctttccagggtgccgaactgctcggcgatcaccagtggcgcgtggttaggcaacatcacgccgccggaacccacgcggatggtcgaggtgccgcctgccaggtaaccgagcagtaccgaggtggccgaactggcgataccgtccatattgtggtgctcggctacccagaaacggtggtagccgaacttctccacatgctgggccaggtccagggaattacgcagcgactgcgccgggctgccgttggcgcgtacgggcaccaggtcgagggtcgaaaattttacgtcggacagcgatttcataagcctgcttctccaatagggcgcacaggcttttgtaaacgagccaaaacctgccgctgcatgtgcatgttctatgcaatgagggcatatacccgagattcaataggagggtctgaaatttcctactggattgctaggtttttccgacaagatgaactttgccggggcgtctatcctcagaacccttaccgacgcaaaaccaccgttcgaggagaaagctatgagtatcgttaaaaaggcatccgcgcattgggaaggcgacctgaagactggcctgggctccatttccacggaaaccggcgtgctgcgcgaagcgccctacggcttcaaggcccgtttcgagggcggcaagggtaccaaccctgaagaactgatcggcgcagctcacgccggctgtttctccatggcgttttccatgattctcggcgacgctgggctcaaggctgacagcatcgacacccaggccgaagtgaccctggaccaggtcgagggcggctttgcgattacagcagtgcacctgatcctgaaggccaaaatcccaggcgcaagccaggcgcagttcgatgaactgagcaaaaaggccaaggaagggtgcccggtgtccaaggtgttgaatgcaaccatcacgttggatgccacgctggtcaactgacacagcagtaatcttatgtgggagcgagcaagcctgctcccacattttagttctgcgttaaattagaactcgtgtttgcaaaatgtggtcgaatagcccatgcagcctaggcgcacactcgtgcgcagcgcattcagggagctccacacatgaaacgttttgccttggcaatcatctgcggtgtattggccacttcggccgtggccgcgccaaaagattgtgaagagctcaggaaagaaatcgaagtgaagatccaggccaaggcgattccgtcctacaccctggaaatcatcaccgccgaagaagccaagaaccatgatgaagccatgattgttggttcgtgcgaaaacggcaccaagcgcatcatctaccaaaagaacaacgactgactcagatgcagttcacgctgcgctcttcggccaataactggcgggttgagtcgtacagccggatgttgggcgtgaacgccagtgagcgcccttccagcacatagcgctggccggcctgaaagtggtcgtactgcagtgtcatgaagcaggttcgatacatcatctggctgaggccacccaaaccgccgccggcgggcacttcaaagtcaaagcgcaccatcagctcgtgagggccgggaggcatttgaaaaaagcgcccgtcgtcgaggtttttcccgtccaggcgctgagccatcaccaacttggagcccggcgtcggtgtagtgaaatcgacccaggcctgctgcgggtccacaggggggatgggggtagaggcgcaagcgctgaggaacacagcggcgacgggaagcaaaagctggcgcatggcaggtactcaacacgaagagaggcttgagtataaacacgccgtgccgtggaaaaatcccctgcaagcgcgatagtctggcgaaccaatctcccaggagcagtcagtgcatgatcaggcgttttcttccagggctgatggttgtgctgctcagcggctgctccagtgtcagttattacagccagttggcgagcggccagtggcagctgttgcgggcccgggagccggttgccgaggtcatcgccgaccctgctcgcccgccagtgctgcgcgagcatctggctcaatcgcagaaagcccgaatctttgccagtgaacagctgcatctgcctgacaaccaaagttatcggctgtatgccgatattggccgaccctatgtggtctggaatgtctttgccacacaggaattctctctgtcaccacagaaccattgctttcccatcgccggttgcgtcgcctatcgcggctactacaaccaaggcgcggcgcggggcgaggcggcactgttgcggcaacagggcatggacgtgtcgatcggtggagtggaggcctactccacgctgggctggttcaacgatccgatcatgagttcgatgatgagctggggcgatgagcgcctcgccacgctgatcttccatgagctggcccaccagcgcttttacgtgaaggatgacaccgagttcaacgagtcctatgccagttttgtcgagcaggaaggcacccggcaatggcgtgtggcgcggggcctgccgcctgtcggcgatgcggcgttgaagcaacgcgatcaatttatccggctgattctcgatacccgcaaacgtctggaggcgttgtacgcacagccgttggcagcggacgcgatgcgccgggccaaagcggcgcaattcgaacagttgcgccgcgaataccggcacctgcgtgatagccaatggggtggtgacaagcgttatgacgcctggatcaaccagccgatgaacaatgcccgactgttgccgtttgggttgtatgaccaatgggtgccggcgtttgcggcgttgtttgcgcaggaaggtggggattgggtgaagttttatactgcggtggagcggttgggtgggttgccggtggagcagcgtaaagcggcgttgaggcagttggagagggttggccgttagggccttatcgcaggcaagccagctcccacagttcaccgattttcaacatgagaatgcggtcaactgtgggagctggcttgcctgcgaaagcagtctcaaggccgctgcaaaaacgcctgatgcatctggtccaacgtctcgaaatgccaggtcggcgcctcggcattcagctcttcaaaactaccaaacccataccccacggcgaccgaatccagcccattactgcgtgccccgatcaggtcatgcttgcgatcaccgatcatcaaggtggtggccgggtccagccgttcctcacgcatcaaatgcgcgatcaactcgaccttgttggtacgcgtaccgtccaactcgctgccgtagatcaccttgaagtgcttggcaaagtcgaaatgccgcgcaatctcgcgggcaaactcccacggtttggaggtggcgacgtacagctggcgcccttggctgttcagctcttccaataacggcatgaccccgtcgaacacgcggttttcgtacaggccggtaaccttgaagcgctcacggtagaaattcaccgcttcccacgccttggcctcgtcgaaggcgtaaaactgcatgaacgcctgcagcaagggcgggccgatgaagtgttcgagcttccccaggtcgggctcatcaatgcccagtttggccagggcgtactggatcgaacgggtaatgccctcacgcgggtcggtgagggtaccgtccaggtcgaacaggacggtggggtgatgcagggtcattgatcgaatccttcggccaggtgcaggtctttgagtttcacgtagttcgccgcgctgtaggtgaaaaaggcgcgctctttgtcagtcaatgcgcgaacctgcttcaccgggctgcccacatacaaaaaaccgctgtcgagtttcttgcctggcggcaccaggctgccggcgccgatgatcacgtcgtcttcgaccacggcgccatccatcacaatactgcccatgccgatcaggacgcggctacccacggtgcagccatgcagcatgaccttatgagcgatggtcacgtcgtcgccgatcagcaacgggtaaccctgcggattgaacggcccggcatgggtaatgtgcagcacgcagccatcttgcacgctggtgcgggcaccgatgcggatgcggtgcatgtcgccgcgaatcactgtcagcggccaaaccgagctgtcagtgccgatttcgacatcgccgatcaccaccgccgaaatatcgacaaacgccccggcgccgagggttggcgtgtggttctgataggtgcgaagggtcacgatagcctctctctgttgtgctgatagctgcggtgggtgttgattgtaattaagatggccccatctttgttctacatgtttcttcagccaaggtgcccaccgtgagcgcgaacaaccctcttttgcagtcctacgacctgccgccgttctcggcgatccgtgccgagcacgtgcagccggccatcgaacagatcctcgccgacaaccgcgtggcaatcgcagagatcctgcaaagccagggtaaaaatccgacgtgggccggcctggtcctggccatggacgaactcaatgatcgcctgggtgcggcctggagcccggtcagccacctcaatgccgtgtgcaacagcgccgaactgcgcgaagcctatgaggcgtgcctgccggccttgagcgcttactctaccgaaatgggccagaaccgtgagctgttccaggccttcgaagccctggccaacagcccggaagctgccggtttcgatgtggcgcaaaaaaccattctggaacactccctgcgtgacttccgcctgtcgggtatcgacttgccgccggagcagcaaaagcgctacgccgaggtgcagagcaagctgtccgagctgggcagcaagttctcaaaccagttgctggacgccacccaggcctggaccaagcacgtcaccgatgaagccacccttgccggtctgaccgactcggccaaggcacaaatggccgccgccgcccaggccaagggcctcgacggctggctgatcaccttggaattccccagctactacgccgtcatgacctacgcccaggaccgtgccctgcgtgaagaggtgtacgccgcctactgcacccgtgcgtcggaccaaggcccgaatgccggtcagaacgataacggcccggtgatggaacagatcctcgacctgcgtcaggaactggcccaattgttgggttatgcgtccttctccgagctgagcctggccaccaagatggccgagtccagcgaccaggtgctgagctttctgcgtgacctggccaagcgcagcaagccgtttgccgcccaggacctgcaacagctcaaggcctatgccgccgagcaaggctgccctgatctgcaaagctgggacagcggtttctacggcgaaaaactgcgtgagcagcgctacagcgtgtcccaggaagcgctacgcgcctacttccccatcgacaaagtgctgggcggcctgtttgccattgtgcagcgcctgtacggcatcgagattgctgagctcaaaggcttcgacacctggcacccggatgttcgtttgttcgaaatcaaggaaaacggcgagcacgtcgggcgtttcttcttcgacctgtacgcccgcgccaacaagcgtggcggtgcctggatggatggcgcccgtgaccgccgccgtaccgttgatggcgtgctgcaaagccccgtcgccaacctggtgtgcaacttcaccccggccgacagcggcaagcctgccctgctgacccacgatgaagtcaccaccctgttccacgaattcggccatggcttgcatcacctgctcacccgcgtggaacatgccggagtatccggtatcaacggtgtggcgtgggacgcggtggaactgccgagccaattcatggagaactggtgctgggagcctgaaggcctggcgctgatctccggccactacgaaaccggcgagcccctgccccaggacctgctggagaaaatgctcgcggcgaaaaacttccagtccggcctgatgatggtgcgtcagctggagttctcgctgttcgactttgaattgcacgccacccatggcgatggtcgcagtgtggcccaggtgctggaaggcgtgcgcgatgaagtctcggtcatgcgcccaccggcctacaaccgcttccccaacagcttcgcgcacatcttcgccggcggttatgcggcgggttactacagctacaagtgggccgaagtgctgtcggcggacgcgttctccaagtttgaagaagacggcgtgctcaatgcccagaccgggcgggcgttccgtgaagccatcctggcccgtggcggttcccaggcgccgatggtgctgttcgtcgacttccgcggacgcgcgccgtcgattgacgcactcttgcgccacagcggcctgagtgaggacgcggcagcatgagtgaagggcctgtgatcaccaaaaagcaatttatcgctggggctgtctgcccggcgtgcagcgagccggacaagttgaagatgtggaccgaagacaacgtgccgcaccgcgagtgcgtggcctgcgggtataccgatacgctgaatgatcaaggcctgtcggtgcccaaggaattgggcactagggtcaataccaccgcgctgaaagcgccggcggatcctaaagtgcaggcagtgcagttcttcccgaacccgaagctgaaaaaagactaaccccgcaccccctgtaggagcgagcttgctcgcgaaaaacgttaacgataacgcgcgctatcctggataagcgcggtgctgttgagtttttcgcgagcaagctcgctcctacagttgtttctctgcctggcccgttgtggtgatccagtctttcattgagcacaacgcaaacgcgctggtgctgcaatccccatttgctaaagctgtgcgcaacttgtcgacatcggctttcatcatgtagcgaacgccatccttgaaaccgttgctgctgccaaagccgcccaaggtcatctcgttcagcgcatcctccttgctccacccctgcaccaccacccgatacatcgctgccatcaggccggtgcggtcggcgccgtgcttgcagtgcatcaacaccgggccatcggcctctgctgcctgaatcgccctgatcgccgccagcacgtcggaatcgtcgacgtggttggtgcgatagctcaactgcacctgtttgatatcagatgattggagccactgcgcatcagattccggcaggaagttgatgaccgtagcgatcttgagcgtttgcaacagaggcagcgcacgctcgtccggcaatgcactgcgatagagcgtgggtgtcatttgatgcaggttgtattggttacccaccggctgggcccattccggcgagcggatcgacgcagcctcatcggcttgtacggtgttgagcaggctcatgagcgccaggcctagaacgagcagtatgcgtgtgttgaacatgaacgttgtgaccgagcgaggaagtggctgatgggccccagactcactcaaggcgggtcaatacggcgtgaggtccgtgtcaaagaatcgtgatgcttgcgatctgatccggtgtttttgtcgtcgaattgacgcctctgaattcttagcctgctatcatttgtaactaatgtttgccattgtgctgtatctgcttggatccaattagccgcaagccttcacgctgctcccagaagcggcggataaacccgtgaccacatgatgaggtgtacccatgtctgatcaagatcaagacaacccccggcgtgactttttacgcaaatccttgaccttgatcccggtggtcacggttgccagcaccggccttggcggttcgatgctgatggccacgccggaaccggcccaggccgaaccggccaagcctgcggtcagcgataaagcctacgagccgagctatttcacagccgaggagtgggcgtttatcaacgctgccgtcgagcgcttgattcccgctgacgcccagggcccaggtgccttggaggctagcgcgccggaatacatcgaccgccagatgaacactccttacgccagtggcgccctgtggttcatgcaaggcccgttcaacgccgacgcggcgccggagatgggctggcagagcaagttggtgcccaaggagatctatcgcctgggcattgctgccacggatgcgtggtcgaaagcgttcaacggtaaagcttttgctgcgcaagacagcgctacccgagacgatatgctcaggcgtctggaggctggcggcagcgaagtggcggcgcacttcgacgccgtgccacccaagatgttctttaaccttttgctgcaaaacaccaaggaaggcttcttctgcgaccctatccacggtggcaataaaggcatggtcggctggaccatgatcggcttccccggcgcccgcgccgacttcatggattgggtggaacgcaacgagcagtaccccttcccggctgtttccattcgcggcgagagggcataaacgtggcgaccatcatgaagaaagtggatgcagtgattgtgggcttcggctggacgggcgcgatcatggccaaggagctgacggaagcgggcctcaacgtggtagcgctggagcgcggcccgatgcaggacacttacccagacggcaactatccccaggtcatcgacgaattgacctacagcgtgcgtaagaagctgttccaggacatctccaaagaaacggtgaccattcgccacagcgtaaatgacgtcgccctgcccaatcgtcagttgggcgctttcttgccgggtaatggcgtgggtggtgcggggctgcactggtcgggcgtgcattttcgcgtcgacccgattgagctgcgcatgcgcagccattacgaagagcgctacgggaagaacttcattcccaaggacatgaccatccaggacttcggcgtcagctatgaagagctggagccgtttttcgactatgcggaaaaagtctttggcacctccggccaagcctggacagtcaaaggccagttagtcggagaaggccgtggcggcaacccctacgcgccggatcgctccaacccgttcccattggaggcgcagaaaaataccgtctccgcccagctgtttcagaaagcggcgaccgacgtaggttacaaaccttacaacctgccgtcggccaacacgtcggggccgtacaccaacccctacggtgcgcagatgggcccgtgcaacttctgcggcttttgcagtggctacgtgtgctacatgtactccaaggcctcgccgaacgtgaacatcttgccggccttgcgccaagtgcccaacttcgagctgcggcccaattcccacgtgctcaaggtcaacctcgacagcaccaagaagaaagccaccggcgtgacctacatcgacgcccagggccgcgaatgcgaacagccggcggacctggtgattcttggcgccttccagttccataacgtgcgcctgatgctgctgtccggcatcggcaaaccctacgacccgattaccaatgaaggcgtggtaggcaggaacttcgcctaccagaacatgggcaccatcaaggcgttcttcgacaaggacacccacaccaacaactttatcggtgcgggcggcaatggcgtggccatcgacgacttcaacgccgacaactttgaccatggcccccacggcttcgtgggtggttcgccgatgtgggtcaaccaggcgggcagccggccgattgccggtacgtccaacccgccgggcacgccggcctggggcagcgcctggaagcgcgccaccgccgattactacacccatcaggtctctatggactcccacggtgcccatcagtcctaccgcagcaactacctggatctggacccggtttaccgcgatgcctacggtctgccgctgctgcgcatgaccttcgactggcaagaaaacgacatcaagatgaaccgcttcatgatggagaaaatgggcaaagtggcccaggccatgaaccccaaggccatcgccgtgctgggtaaaaaggtcggtgagcatttcaataccgccgcctaccagaccacccacctcaacggtggcgcgatcatgggcaccgacccgaaaaccagtgcgttgaaccgctacttgcagagctgggatgtgcacaacgtatttgtccccggtgcttccgctttcccacaagggctgggctacaaccctaccggcctggtggcagcgttgacctattggtcggcgcgagcgattcgcgagcagtacctcaaaaaccccggcccactggttcaggcataaggagcgatgaccatgaaagcactcgttatcgcctccctggcgctgttcagcagctgctcgatcagcgccgccgaaaccgatctgatcaagcagggtgaatacctggcacgcgccggcgactgtgtcgcctgccataccgccaaggggggcaagcccttcgctggcggcctgccgatggaaacaccgattggcgtgatctattccaccaacatcaccccggacaagaccggcctgggcgactacagcttcgaggatttcgacaaggccgtgcgccatggcgtcgccaagaacggtagtacgctttacccggcgatgccctacccgtcctacgcacgcgtcagcgacagcgatatgcaagcgctgtatgcgtacttcatgaagggggtcgaaccggttgcccaggaaaacaaggacagcgatattccctggcccctgagcatgcgttggccgttggcggcctggcgctggatgtttgccccagcggtcgaggcgcatcagccgcaagccgctgtcgacccggtgatcgatcgcggtgcctacctggtggaaggtctcggacattgcggcgcctgccatacgccgcgtgccctgaccatgcaggaaaaggccttgagtgccacggacggcagcgccttcctgtctggcagtgcgccgttggaaggctggattgccaaaagcctgcgcggcgaccacaaggacggcctcggcagctggagcgaggagcaactggtgcagttcctcaagaccggtcgcagcgaccgtagcgcggtattcggcggcatgagtgatgtggttgtgcacagcatgcagtacatgtcccaagaggacctgaccgctatcgcccgctacctcaagagcctgccggcggtcgatcccaaggaccagccgcaccagtacgacaagcaggtagcacaagcgctgtggaagggcgatgacagcaagcccggtgcgtcggtgtatatcgacaactgcgcggcttgccaccgtaccgatggccatggctatacgcgggtattcccggcgctggcgggcaacccggtgttgcagacggcagatgccacgtcgttgatcaacattgtgttgaacggcggcaccttgccggccacccatgcggcgccgtcaaccttcaccatgccggcgttcgcctggcgtctgtcggaccaggaagtggcggatgtggtgagttttatccgtggcagctggggcaaccagggcgcgccggtcaaggccagcgatgtggcggatctgcgcaaaaacgatctgcacaccacctcgggcgatgacttgggccaggtgacgcaaaagcactgataagttcgctggccgcccaacggcactggtcagaaacctcgcgcctcgatactgtatataaaaacagtatcgaggcgttttcatgtctactgcgctgccgccccgtggccggggtacggccaccaacctgcacaatcggtttgcacccaccgtcagcgtggctgaggacgacggttggtaccaggaagtgccgccgacccaaggcaccgaagtgcgtatcgaaacggccaagaccatcatcacccgcaacaactcgccggacttgccgtttgatcggtccatcaacccgtatcgcggttgtgagcatggttgcatctactgctatgcgcggcccagccatgcctattgggacatgtcgcccgggctggactttgaaaccaaattgattgccaagagcaacgcggctgatgtgctggagcagcagttgtccaagccgggctacgtgtgcgcaccgatcaacctgggctccaataccgatccgtaccagccaatcgagcgtgaataccggattacccggcaaacccttgaggtactgctgcgctaccggcacccggtgaccatcatcaccaagggttcgttgatcctgcgtgacctcgacttgctgaccgagttggcccgccagcgcctggtggcggtgatgatcagcctcaccagcctggacgacgagctcaagcgcatcctggaaccgcgcacggcagcgcccaaggcgcggctgcgggcgattcgggtaatgcgcgacgcgggtatcccggtgggcgtgctgtgctcgccaatgatcccgatgatcaacgacagcgagctggagagcctgcttaccgaagctcacgcggccggcgcacaaagcgcggcgtatatgatgctgcgcctgccgttggaggtggcgccgttgttcgaggagtggctggtggcccattacccccagcgagcggcccatgtgatgagcctggtgcgccaggtacgcgggggtgaggtgtatgacagccggtttggcgtgcgcatgcgcggtgaggggccgtttgccgatttgctggcgcagcggttcaccaaggcaatcaaacgcctggggctgaatcggcgggaagggttcaacctcgattgcacggcgttttgcccaccgggcaggcagatggctttgttgtagactgagggacagacgtgcacctttgctgtagcaatagtcgcgttttgacatcactgaaacccgcgttctagagcggttcattcagtttgagttaagtttcggcggttaccttgttcagcgagtgactgatgagtcggcggcctggccggtgcttgttttacaactatttcaccgccatggcgtcgaactgacctgaaccctcccctgcattgatcaagaggatgaatcatgagtgacaaggataaacagccgttggctgcgtcggcttcagcccctcaggtggcggaatccgccgatgcagcgctgcagcatatcgttgacggctttttgcatttccatcacgacgtcttcccccagcaggaagaactcttcaagaaactcgccactgcccagagcccacgggcaatgttcatcacctgcgccgactcgcgcatcgtgcccgagctgatcactcaaagctccccaggcgacctgttcgtgacccgtaacgtcggcaacgtggtgccgccctacggccagatgaacggcggtgtttccaccgctatcgagtacgcggtgctcgcccttggcgtacagcacatcatcgtgtgcgggcattcggactgcggcgccatgcgtgccgtgctcaaccccgacagcctggaaaagatgccaacggtcaaggcctggctgcgtcacgccgaggtcgccaagaccatggtccatgacaactgcgactgcgccaacgaaggcgagagcatggcggtgctgaccgaagaaaacgtcatcgcccaactgcaacacttgcgcacccacccttccgtggcttcgcgcatggccaatggtcatttgtttatccatggttggatctacaacatcgagaccagcgaaatacgggcctacgatgcggacaaagcggcgttccgaccgctgaacggcaccgagccgatcccttcagcgacgcctaaagcgcgcttctaaaacacttccctgccgggtaatgcggtggctgccatggatgcagccaggctttaccgcgcccggcgaatgcctcgggagagtcatcatgcgtgctgctcaattgaaagctgtattgccacgggagctgctcgcctcggtggttgtttttctggtcgccttgccactgtgcatgggcatcgcgattgcgtccggcatgccgccggccaagggcctgatcacgggcatcatcggtggcctggtggtgggctggctggccggctcgccgctgcaagtcagcggcccggcggcgggtctggcggtgttggtgttcgagttggtgcgccagcacggcatgctgatgctggggccgatcctgctgctggccggcttcctgcaattggtggccgggcgtttgcgcctgggctgctggtttcgcgtcaccgcgccggcggtagtctatggcatgttggccgggattggcgtgttgatcgtgttgtcgcagattcatgtgatgctcgacggcgcgcccaagccgtccgggctggataacctggcaggcttcccggcagcgttggctgaagcaattccgaccttcggcggcgggctcggttggcaggctggcgtgctcggcctgtcgacgatgttggtgatgtacctgtgggacaaattccgcccgcaaccactacggtttgtgcccggtgcgctgcttggcgtgggcctggcgaccgtcgccagcctgctgctggcgctgcaggtcaagcgcgtggaagttccggaaaacctggcggacgctatcgactggctgcgccccagcgacctgctgaacctggctgatccacagctgctgatcgcggcgttcgccgtggcgtttattgccagtgccgaaaccctgctgtctgccgcagcggtggaccgcatgcacagtggtcaacgttccgacttcgataaggaattgtcggcccaaggtgtaggcaacatgctttgcggcctggttggcgccttgccaatgactggcgtgatcgtacgcagctcggcgaacgtccaagcgggtgctaccacgcgtctgtcggcgatgttccatggcctgtggctgctgggtttcgtgctcttgctgtcgagcgtgctgcagagcattccggtcgcgagcctggcgggtgtgctggtgtacaccggcatcaagctggtagacgtcaaggcgttcaaggcgctggggcgctatggtcggatgccgatgttcacctatgcggccaccgcgctggcaatcatctttaccgatttgctgaccggcgtgctggtgggctttgggctgacgctggtgaagttggcgttcaaggcgtcgcgtcttaaagtcagccttgttgacctgcctcaggaaggtgaaatggagctgcgtttgacgggggcggcgacctttctgaaggtgccggcgttgactcaggtgctgtcggcggtgcctgcggggaccaccttgcatgtgccgctgagtaacttgagttacatcgaccactcttgcctggagttgctggaagaatggggccgggccaatgcagccaagggctcgacgttggtgatcgaggcgcgtgggttgaagcgtcggctggaaggtcgggtgagaacgacagtggggatcggctcagcgcctgcctgacccctcaaaaaactgtgggagccgggcttgcccgcgatggcggtggttcagtcaactaatctgttggctgatactccgccaatcgcgggcaagcccggctcccacagttgatctttgtaagccggacgatttacgcaggttgatccagcgacagctcaaccccaagctggcgcgacaggcacggccagcgcttccaggacgcttcggtctgcgggctcttgagctgctcgcgataggcctcgaccgactccagcgcaaagctttcctcgttaagcatctcatccaccgccaggtgcacggcttcatccaactggttggcgaagtcttcgccgatcagttgatgggcgatcacgttggccacggtggtatccgctggaatcaacggctggccaaaatgcttgatatacagatcgtttacttcttcgaccaggcgatgcgccaggtaggcctcatccagcaggccatcaaggccgtcgtggccggccagaatcgctggcggctgcaggaagaaatgttcagcgattttcagtaccggtttgatctggctttcaatcccggcctcacgggccacgtcattggcggcgtcgagcaaatcaggaaccaggtcgatgtaagcggtcacaaaacgggtcatgaccatgttgcgatcaccgtcagccagggcgatggacgaatgcaggtgcggcacttgttttttcagctggctgacgagctggccggtgctggcttcgtgttgatgggcacgggaaatctgctcgcgcaatgcggcggtgttcatgagggctccagtgaagcaggcgtaggaaaagggagaagataaggtagttcgtttatacgagcgcctaagacgcatttgtcataattatttcatggttataggcaggggttatatcgaaatgccatcgttcgtcggataaacgattccgctgcctattttacgggctccgtctgtctgtttctattcatttgcccccacacattgcggggttgctacggctgtctatactcgattttgtacgcaattagctgatgacgcccaactgcatgacgcaggcaaggcttggcggttgtaagcagtatggaagccgctcccttcgccgcaggtgcaaaccggcgggataacaagaaacataaaggggaacccgcaatgacgcgacatccacacgtttggatgggcctcctggtgtggtcggtattcggccaggcgcacgccgcctggactacgaatatggcgccaggggctactgaagtcagccacgctgtgtttgacctgcacatgaccattttctggatttgtgtggtgatcggcatcgtcgtgtttggcgcgatgttctggtcaatgatcctgcaccgccggtctacgggccaggtagcggccaagttccacgaaagcaccaccgtggaaatcctctggaccgtggtgcccttgctgattctggtggccatggccattccggccaccaagaccctgatcaacatctacgacagcagtgaatcggatatcgatatccaggtcaccggctatcagtggaagtggcattacaaatacctggggcaggatgtggagttcttcagcaacctggccacgcccgccgagcagatccataaccaggctaccaagggtgaacactacctgttggaagtcgaccagccgctggtattgccggtgggtgccaaggtgcgctttctggtgaccgccgccgatgtgatccactcatggtgggtaccggccttcgcggtcaagcgcgacgccatccccggcttcgtcaacgaggcctggacccgcgtcgagaagcccggcatctatcgtggccagtgcgccgaactgtgtggcaaggaccatggcttcatgcccatcgtggttgaggtcaagtccaaggctgactacgacacctggctgggcgagcgcaaggaggaggcggccaagctcaaggaactgacctccaaggagtggacactggacgaactggtggctcgtggcgacaaggtctatcacaccacctgcgtggcctgtcaccaagccgagggccaaggcttgccaccgatgttcccggcgctcaagggctcgaaaatcgccacggggccggccaaagaccatctgagcatcgtgtatcacggcaagcccggcaccgcgatggcagctttcggcaagcagctctcggaagtggatatcgccgctgtggtgacctatgagcgtaacgcctggggtaataacaaaggcgacatggtcacgcccaaagacgtgctggctctgaaacaggcccaaagcaaatgactactttcattgccaatgccctgaatcgccccgctcactcgcttgcaggagaacggccatgagcactgtgatcgaccatggtcatgccgaccatgcccacggccccgccaagggtctgatgcgctgggtgctgaccaccaaccacaaagacatcggcaccatgtacctgtggttcgccttcaccatgttcctgctcggtggctcgttcgccatggtgatccgcgccgagctgttccagccgggcctgcagattgtgcagccggcgttcttcaaccagatgaccaccatgcacggcctgatcatggtgttcggcgcagtgatgccggcgttcgtcggcctggccaactggatgatcccgctgatgatcggcgcgccggacatggccctgccgcgcatgaacaatttcagtttctggctgctgccggcggcgtttctgctgttggtgtctaccttgttcacgcccggcggtgggccgaacttcggctggaccttttacgccccgctctccaccacctatgcgccggaaagcgtgacgttctttatctttgccatccacctgatgggcatcagttcgatcatgggcgcgatcaacgtggtcgccaccatcctcaacctgcgcgcgccgggcatgaccctgatgaaaatgccgctgttcgtgtggacctggctgatcaccgcgttcctgctgatcgcggtgatgccggtactggcgggctgcgtgaccatgatgctgatggatatccacttcggcaccagcttcttcagcgcggccggtggtggcgatccggtgctgttccagcatgtgttctggttcttcgggcatcccgaggtgtacatcatgatcctgccggcctttggcgcggtcagctcgatcatcccgaccttctcgcgcaagccgctgttcggttacacctcgatggtctacgccaccgcgagcatcgcgttcctgtcattcatcgtgtgggcacaccatatgttcgtggtgggcattccgctggtgggtgagctgttcttcatgtacgccaccctgctgatcgccgtacccacgggggtgaaggtattcaactgggtcagcaccatgtggcaaggctcactgacgttcgagacgccgatgttgtttgcggtggcctttgtgatcctgtttaccattggcggcttctccgggctgatgctggcgattgccccggcggacttccagtaccacgacacctactttgtggtggcgcatttccattacgtactggtgcccggcgcgatcttcggaatcttcgcctcggcctactactggctgccgaaatggaccggccacatgtacgacgaaaccctgggcaagctgcacttctggttgtctttcgtgggcatgaacatggcgttcttccccatgcacttcgtggggctggccggtatgccgcgtcgggtgccggactacaacctgcagttcgctgacttcaacatggtctcgtccatcggtgccttcatgttcggcgccacgcagatcttcttcctgttcattgtcatcaagtgcatccgtggcggcccgcctgcgccggccaagccgtgggatggcgccgagggcctggaatggagcgtgccctcgcccgcgccgtatcacaccttcaccacgccgccggaggtcaaatgaagccctccctatactcctcctgtgggagcgggcttgcccgcgatggcggtatgtcaggcgctgaatctcccgactttgaggtcctcatcgcaggcaagccagctcccacagaaagtccaaagccaggtgggcgccatggctgactccgtaccgctcaagcgcctggtcacccgcctgctgattttggtgttggcgatgttcgccttcggcttcgccctggtgccgatctatgacgtgatgtgcaaggcgttcggcatcaacggcaagaccgccggccagtacgagggcgagcaaatggtcgacccctcgcgccaggtgcgcgtgcagtttctgtccaccaacgccatcgacatggtctgggagtttcattccaaggctgacgagattgtggtcaaccccggagcagtcaacgagatgctgttcgtggcctacaaccccaccgataagccgatgaccgcccaggcgatacccagcatttccccggccgaggcggcgatgtacttccacaagaccgaatgcttttgcttcacccagcaagtgttgcagcccggtgagcgcattgagatgcccgtacgtttcatcgtcgatcgcgcgatgcccaaggatgtgaagcatttgaccctggcgtacacgctgttcgatatcactgcgcgccagccgcccgtggccgtcaggaccgggggctagctactgtttgccccctcaatcaggagagcgaatacatgtcgaatcatgatacgtactacgtaccggcgcaaagcaaatggccgataattgccacgattggcctgctggtcaccgtgtatggcctggccgtgtggttcaacgacttgaaggccgcgcgggccgaatcccacgggccgtggatctttttcgtcggcggtttgctgctggcctacatgctgtttggctggtttggcgcggtgatcaaggaaagtcgtgccgggctgtacagcgcgcagatggaccgctcgttccgctggggcatgacctggttcatcttttcggaggtgatgttcttcatcgccttttttggtgcgctgttctacgtgcgcgtctgggctgggccttggttggcgggcgagggccccaagggcattgcccatatgctgtggccgaactttgagtttgcctggcccctgctgaacaaccccgaccccaagctctacccagcgcccaaaggcaccatcagcccctggggcctgccgttggtcaacaccatcctgctggtgagctccagcgtgaccatcaccatcgcccaccatgccctgcgcaaaggccatcgcggcgcgctgaaactctggctggcgatcaccgtgctgctgggcctggcgtttcttgggttccaggctgaggaatacatccacgcctataaagagttgggccttaccctgggctcaggcgtgtacggcgcgacgttcttcatgctcacgggctttcacggcgcccacgtgaccatcggcaccattattttgtttgtgatgctgatgcgcatcctgcgtgggcatttcaatgccgagcaccagttcggtttcgaggcggccagttggtattggcactttgtggacgtggtgtggatcgggctgtttttctttgtctatgtgctgtgacgccgcttaccacggcgcatgagagaccagttggccgctgaaaaagccccaggcgatcaagcccacggtgatcacggccagcgtgacacgcacggtcaaggcggtgacgaggcggttggagttgccctcgtccttgaccaggaagaacaagccactgaacaggctcacgacggtcgcgatcagcatcagggcaatggcggctttgagcatggtctggctccgggcttattgggagaggggcgatgagatcgagtatagccagtgccctgcagcgctttcgtccgggcatcgcgccgacgctggtggtgctggtgttgctgccattgatggtcggcctggggttttggcaactggcccgtgggcacgaaaagcaactgctggtagaccgttatgccgagcgccgcgccgccgagccggtcagcagtgcgcagctcaatgacatggctgatccagccttccgtcgcgttcaccttcgcgggcaactggatggtgaacacagcgtattgctggataaccgcatgcgtgacggcaaggccggtgtcgagctgctgcagccttttcatgatcaggccagcggcctgtggctgttgctcaatcgtggctggctgccttggccagaccggcgtatcgcgcccgcctttactacccctgaacagacgctgaacctcgacgcctgggtgtacgtcacccccggcgagaccttccaactgcatgccgacccggccagcacgcaatggccgcgcctgcttaccgcactgcaccccgacgcgctgtgggacgaactggggcgcagcggttttgcctatgagctgcgtgccgaagcgggccccgatacctacgaaaccagctggcccgtggtcgccatgggcccggaaaaacacctggcctacgccgtgcaatggttcgccatggccgtggcgttgctggcgctttacctctacctcggatggcataacaaaaaggagaagccccatgggagcggccatgaatccacccagcacatctgacacgcttgatcggcgcaagggtcgctggcagctgattttgatcctgatgatggtgatcggcccgatggcgctggccacctttatgtacaaattgcagttctgggtgccggacagccgcagctaccacggcgaactgatcggcaacggccagacccgcgccgacattggtgtgcaggccgatgaacagcgttggcaactgctggtcaccgcccccgccgcctgcgctgccgagtgccagcaactggtgtacctggcgcgccagctgcagatcagccttggccgtgatgcgtctcgtgccagccatgccctggccggcgcgcaacctttgagccgcgaatacgaggccaagctcaaggctgaatatccacagctgcagcgctacccgctggatgtgtcgacctttgccaggaacgctgccgcgcctggtgaggcacaactgtggatcgtcgacccccacggcaatctggtgctgcgctatgacgccaaggtcaagggcaaggacttgctcaacgacctgcgcttgctgctgaaactgtcgaacatcggataagggcaccgtcatggccaagcctggatttcgcctcgcgctgtttgccaccttactggcgttgcttgtcgtgctgctcggcgcctatacccgcctgacccacgccggcctcggctgcccggactggccgggttgctacggctttatcagcgtgccccaaagcgaagcccaactggcccatgccgagttgcactttcccgacacgccggtggaggccgacaaaggctgggccgagatgacccatcgctacttcgctggcagcctgggcctcttgatcgcgctgctggcggcgcgttcgtggcgtcatcggcgtgatccgggccagccagtgaagctgccgctgttcctgctgacggtggtgttggcccaggcggcgtttggcatgtggaccgtgaccttgaagctctggccgcaagtggtcaccgggcacctgttgggcggctttgcgaccttgagcctgctgtttctgctgaccctgcggctgtccggcgtactgccggcgctggtcgtgcccaagcgcctgcaatattgggcgacggcgggcctggtgctggtgatcgggcagatcgccctgggcggctgggtcagttccaactacgcggcagtggcctgtgtcgatttgcccacctgccatggccagtggtggccggcagcggacttcgccaatggttttcacctgacccagcacatcggccccaattacctggggggccagctcgacagcgaagcgcgcactgccatccacctgacgcatcgcatcggcgccgtgctggtcacgctggtgctgctcggtttggcctggcaactgcgggcagtggggatgacgcgcctggccggtctgctgttgatcgccctggccgcgcagatctgcctggggctgagcaatgtggcgttcggcctgccgttaccggtggcggtcgcgcacaacgctggcggggcaacgttgttgttgacgctggtgctggtcaattatcacgcgcgcaccagcctggttcgggtgcgtcacccgcgtctgttcggttggcgttttatcccgcgcaaacaggtgtcgggcctgatcacccttaaaggagaactgccatggcgaccgtgatcggcgcacgtcgcgaccgggcgatctggcgtgactatctggagctgaccaagcccaaagtggtggtgctgatgctgatcacctcgctggtgggcatgttcctcgccacccgcgccggggtgccctggacagtgctggtgttcggcaacctcggcattgccctgtgtgccggcggcgcggcggcggtcaatcatgtggtggatcgacggattgatgccgtgatggcgcgcactcacaagcggccgatggctgaggggcgtgtctcgccgatggcggcgttagcgtttgcgttgttcctggcgattgcagggttggccctgctgctggcgttcaccaacccgctggcggcctggctgaccttggcttcgctgctgggttatgcggtgatctacaccggctttctcaagcgggcgactccgcagaatatcgtcatcggcggtctggccggtgcggcgccgccgctgctgggctgggtggctgtcaccgggcatgtgggtgccgaacccttgctgctagtgctgatcatcttcgcctggaccccgccacacttctgggccctggccattcaccgcaaagaggaatacgccaaggccgacatcccgatgctgccggtcacccatggcgagcactacaccaaggtgcatatcctgctgtacaccttcgccctgctggcggtgagcctgatgccctacgttatccacatgagcgggctgctctacctggcctgtgcgctggtgttgggggcgcgctttctgcaatgggcctgggtgttgtaccgtggcagccagccgcacgcggcgatcaacacgttcaagtactctatctggtacttgctgctgctgtttatcgccctgctcgtagaccactacttattgttgaacctatgactcgaactcaaaaaaccgtcttcatcctcgtggccctggtggcgttgatcatgggcctgaccgtcaacaaagtgctctcgggcaaaggccagggcgaccccactgcgctgatcgacgccggcatcattctgctgccgcaaagccgccagttgccagcggtgaccatgaccaatcaggaaggccagccggtggtggtcaacgagttgaagggcaagtggagcctgctgttttttggctacaccttctgcccggatatctgcccaaccaccctcgcccagcttcgccagatcaagagcgagctgccccaagaggctgtggataagttgcaggtgatcctggtcagcgtcgatccgcaccgcgatactccggcgcagctcaagcagtatctgggttactttgatccgcagttccaaggcctgactggcgcgaatgtggaggatgtgcagaaggtttcgaatgcggtgagcattcccttcattccggcggataccagcaagccgaactacaccgtcgaccacagcggtaacctggcactgatcggcccggatgggacgcagcgtgggtttattcgtgcgccgttgaacaaccagaagctggtggcgcagttgccggggttgctacagcgcaagtgagcacctgatgatcgttccaacgctctgcgtgggaatgcagttagggacgctctgcgtccccaagcgtgacgcagagcgtcacaagaggcgttcccacgcggagcgtgggaacgatcagatcaggagagatcagaacgccggcttgatcgcgcctttgtacttctcttcgatgaatttcttcacttcaggcgtgtgcagagctgcgaccagcttcttcaccgcgtccgcatccttgttgtcttcgcgggttaccaggatgttcacgtaaggcgaatcgctgccttcgatcaccagggcatccttggatgggtccagcttggcttccagggcgtagttggtgttgatcagcgccaggtcgacctgggtcagcacgcgcggcagggtggcggcttccagttcgcggaatttcaggtttttatcgttgccggtgatgtccttgatggtcgacaggatgttggtcgggtccttcagggtgatcaggccgttcttggccagcagtaacagcgcacgaccaccgttggtggcgtcgttcggaatcaccacgttggcgccgtcaggcaggtcggccaattttttgtacttgctggagtaagcgcccagaggctccaggtgcaccgcgccgacgctcaccaggtgagtgcctttggccttgttgaattcatccaggtacggctggtgctggaagaagttggcatccaggcgcttttcagccacctgtacgttcggctgcacgtagtcggtgaagactttgacgttcaggtccacgccttctttggccagggcaggcttcacgaattcgaggatttcggcgtgaggcaccggcgaagcagcgaccgtaatggtctcggcgtgggcggaaaacgcagccacggcggcgaaagcaaccagtagttttttcatccagcaagctccttgttcgggcatctgccggctgtgtgccggcaatggccgttatttacgagaaaaatgcaccaccagccggtcgccgacggtttgcagaatttgcacaagaatcaacagcatcaccacggtgaccaccatcacatcggtctggaagcgctggtagccaaaacggattgccaggtcgcccaggccgccagcaccgaccacacccgccattgcggtgtaggaaaccagtgtaatcgccgtcaccgtaatcgctgcgaagatgccagggcgggcttcgggcaacagggcgttggtgatgatctggcgggtggtagcacccatggcctgggtggcttcgatgatgccacggtccacttcgcgcagggctgtttccaccaggcgcgcaaagaatggcgtggcgccgacgaccagcggtgggatcgcgccggcgacacccagcgacgtgccggtgatcagtaccgtgaatggaatcatcacgatcagcaggatgatgaacggtagcgagcgcaagatattcacgatcagcgacagcagcgcgtacaggcctttttgttcgaacagctggcgcgggctggtcaggaacaacagcacgcccaggggcaggcccagcagcacggtgaagaacagcgagccgaacagcatggtcatggtatcgccggtggcgagccagatttcagaccagtcgatattggcgaagaagctcaggaaaacgtccatcagcgcaggacctccatgtgaacgtcggcggcggtgaagcgtgcaaacgcagcgtccatgtcaccgccggtgacggcgagggtcagttgcccgtaagggatgtctttgatgcggtcgatacgaccggcaaggatgctgtagtccaccccggtttcccgtgcgacggtccccagcagtggcgcgtaggtcgcgtccccttggaacgtcaggcgcacgatacggcctggcacatgggcaaagtcgtcgcgctgctcgccttcgtccacctgttcggcttcttgtacaaagcgtttggtggtcgggtgcttggggtgcaggaacacgtcggccaccgagccttgctcgacgatcaccccggcgtccatcaccgcgacctggtcgcatacgcggcggatcacgtccatttcatgggtgatcaacacgatggtcaggttcagctcgcggttgatctcggccagcagttgcaggaccgacgccgtggtttgcgggtcgagggcgctggtggcttcgtcgcacagcaggatttttggcttggtcgccagggctcgggcgatgccgacgcgctgtttctggccgccggacaactgcgccgggtacttcttggcgtggtccgacaagccgacgcgggcgagcagctcagccacacgctggtcgatttccttgcgcgacagttcgccggcgagcgtcagcggcagcgcgacgttgtcggccacggtcttggacgccagcaagttgaagtgctggaagatcatgccgacctgctggcgaaagcgccgcaggccgttggcgtccagcgcagtgacttcttcgccatccaccttgatctggccaccactgggctcttccaggcggttgatcaggcgcagcagggtgcttttaccggcacccgagtggccaatcaggccaaacacctggccgttctcgacgcgcaggctggtggggtgcagggcggggatatccttaccggcgacgcggtaggttttatggacgttttgaaactcgatcacgtagcgaaccttgtggggcgcattgaaaagggatcagcggttagccgggcgcgcattttagcctgtccgtatagcgtttcttagcatttatttcgtattcatccagtcatttggcaataacgcgatcaaaggtcataaaaaaggaacggtgcaaaaccgcgtcagtcactacttaagcaactcgatttcccaggtgccgtgcctggggttttgctcaaacgagccggggaccgctctggccactttgaataaggagttttgactgatgagtaccaagaagccagccaccccgcccaagagtgaacttgcgggtaccgataccctggaccgtggcaacaccaacgccaagttgcaggccctggaagaattccgctctgacgcgactggccaggccctgcgcaccaaccaaggcgtgaagatttccgataaccagaacagcttgaaagtcggcgcgcgcggcccgtcgctgctcgaagacttcatcatgcgtgaaaagatcacgcacttcgaccatgagcgcatcccggagcgcatcgtgcatgcccgtggtacgggcgcccatggctatttccagagttacggcgaccattcgacgctgaccaaggcaggtttcctgcgcacgcctgagcataaaaccccagtattcgcgcgtttttccacggtgcagggcccgcgtggttccggcgacaccgtgcgtgatgtgcgcggttttgccgtgaagttcttcaccgaggaaggcaacttcgacctggtgggcaacaacatgccggtgttcttcatccaggatgcgatcaaatttcctgacttcgtccacgcggtgaaacccgagcctcataacgagattcctaccggcggttcggcccacgataccttctgggactttgtctcgctgcaaccggaatccgcgcacatggtgatctgggccatgtccgaccgcgccattccaaaaagcctgcgcgccatgcagggctttggggtacataccttccggttgatcaataccgaaggtaagtccagcttcgtgaaattccactggcgtccaaaagtcggcacctgctccctggtatgggacgaagcgcaaaagctggccggtaaagatacggactaccaccgtcgtgacctgtgggaggcgattgaaagcggcgattaccccgagtgggagctgggcgtgcagatcgtggccgaagaagacgagcacacgtttgatttcgacttgctcgacccgaccaagatcattccagaagaactggtaccgatcacgccgctgggcaaaatggtgctcaaccgtaaccccgacaacttcttcgctgaagtcgagcaggttgcgttttgcccgggtcacatcgtgccgggcatcgacttcaccaacgacccgttgctgcaaggccgtctgttttcctacaccgatacccagatcagccgactgggtgggccgaattttcatgagattccaatcaaccggcctgtcgtgcctttccataacggccagcgcgacgctcagcatcgcaccgtgattgataagggtcgtgcgtcctacgaaccaaactccattgatgggggttggccgaaagaaacccctgctggtcctaccgatggtggttttgagtcctactacgagcgcgtcgatgccaacaaggtgcgtgagcgcagcgaatccttcggtgaccatttctcccaggcgacgctgttctacaacagcatgagccaccacgagaaagagcacattatcgcggcctacagctttgagctgggcaaggtggagcgcgagttcatccgtgcgcgccaggtcaacgagatcctggccaatatcgacctgcagctggccaagcgcgttgcgcagaatttgggcttgccggcgccgaccaagggcacggtgcctgcccgtgaaacgtcgctgaaagaatcgccagccttgagccaggtgaatttactatcgggcgatattaaaacgcgcaaagtggcgattctggcagccaacggcgttgatggtgcggccattgacgcgctaaaagccgcgctggaagctgaaggcgcccatgccaagttgctggggcctacttcggcgcctgtgaccactgcgcagggcaagacgctgccggtcgacgcctcgatggaaggcatgccgtccattgccttcgacgcagtgtttatcccgggtggcaaagagtccgtgaaggcgctgagcggtgatggtgtggcgttgcattatgtactggaagcctacaaacacctgaaggcgattgcggtagccagtgatgtgaagccgttgctggacctgctgaagctggaagcggatgcggggttaatcgtgggcgcggatgccaaggcgttcaaagcgttttttgcggcgattgcccagcatcgggtgtgggagcgtgagccgaaatccaaggcgattccggcttaacttatcggttgtttgttagatcgtcatcgcaggcaagccagctcccacaccgttcaaatgtgggaggtggcttgcctgcgatgcttttagtccgccttgcgcggaatcagcacaacctgcgccggaatgtgtttcaggatttgccggtgaatcttcaggtcatatcccgaatcaatccgcttcacccgcttggtcagtaacgtggccagccacgggtaatcctgggtgcgtggcacctggatgctgacatcgcactgataattcaccacgtcggtggcgatcgcgtccaactgatgacgcatgtcttcgacatccgcgaggttcagcgccacggtggtgctcggtgctgccgggtcgatgaccttggcggcaggcttggcttcagcggctttcaacgcggcttctgcctggtccaattcggctttgcgtgcatggctgatggcgctgttgacgccaccagtcagcgcaggggccttgggcatcaaggcgcgggcacggctcagggccgtggcggccgcgttgacatcgcccttttgcaacacgatctggctgcgctgcaagtaggcttcggccaattgacgctggtaggcctcaagtgccgggtcattgggcgattgggcctgcagtgcggccaactggtcttcggcggtggccaattcgctgctggccaggttttgttccagctgcgcgatggccgcagcccgcggatccggagcctggggggcagcgggcggcgtactttggcaggcgcccagcagcagtgaaaatgcggcaaggagcagataacgggaggtgaacggcttcattcctgcgactctctatttgcgcaaaaagcgagcaagtctacacccctcgacggggcaggacaaaactcagcagaaacagggcggccgccgtaaccacaatcgacggcccggccggtgtgtccttgaaccaggacagcgccaggccaccacacactgcaagcatccccaggaggctggcgccaatcgccatctgctccggagagcgagcgtgacgttgggcggcggcggctggaatgatcagcagcgacgtgatcaacaatacgccgacaatcttcatcgcgacagcaatcaccacggcgatgagcaacatcagcgccatacgcaggcctgcgacgggcaagccctctaccttggccaattcttcatgcacggtgatcgccagcaacgggcgccacagggtcaccagcaacaccagcaccgcagcgctgccgccgagtatccaggccaggtcggtcgggctgattgccagcaggtcaccaaacaggtaggccatcaggtcgatgcgcacttcatgcatgaagctcagcaccaccaggcccagggacaaggtactgggcgcaaggatgcccagcagtgtgtcggaagccagtggctggcgttgctgcagggtcaccagcagcaccgctagcagcaggcagccgacggtcacggcgatggccgggcttacatccagcagaaagcccatggccacgcccagcaaggcggcatgggacaaggtgtcgccgaaataggccatgcgccgccagaccacaaacgagcccaatgggcccgccaccagagccaaagccaagcctgccagcagggcgtagagcagaaaatcagccatgcttgcagctatctccatgaacgtggggggtatcgacgacggcgccatgcaggtcatgggcgtggtcgtggtggtgatgatagatagccaggctctgggcgttcttgccgaacagctccacgaacgccgggtcgccactgacctgttccgggtggcccgagcagcacacgtggcggttgaggcagaccacttggtcggtggtgctcatgaccaagtgcaagtcgtgggagaccatcagcacgccgcaaccatggcggtcgcgcaggcgggtgatcaggctgtacagctcggcctggccagcgacatcgacaccttgcacgggctcatcgagtaccagcaactcgggctcgcgcagcaaggcgcgggccagcagcacgcgctgcatttcgccgccggagatgctttgcaccgggttgtcgatgacgtgttcggcgccgacttccttaagcgcagcctgggcgcgggcgcggtctacgccgggcaccaggcgcagaaagcgcaagacggagagcggcaacgtcgggtctacatgcagcttttgcggcatatagcccacgcgcagcttgggcttgcgccaaaccgtgccgctgtggggcttgagcagcccgagcacggcgcgcaccagggtggtcttgccagcgccgttggggccgatcaaagtgacgatttgccccggctccacgctcagtgcgatgttttccagcacgttttgcccggcgaacgtgaccccgacctgctccaggcggattaacgcattgctcatcaaaccccctggcagcctgcgcacaggccgaccacttcgaccgtttgcccctcgaccttgaagccgacgtcggcagcgcttttgacaatggcgtcgctgatgcttttttgctcaagctcgatggcggcgtggcactcgcggcagatcaggaactggccctgatgcgcgtgctccgggtggttgcaaccgacaaaggcgttgagcgaggcgatacggtgcaccaggccattttccagcaggaaatccagtgcacggtaaacggtaggcggtgcggcgcggcggccgtcctgctcgctgaggacgccaagaatatcgtaagcgcccaaaggcttatggctctgccacaccagctccagcacccggcgacgcaaggcggtcaggcgcaagcctttctttgcgcacagggtgtcggcctctgacaatgcggtgtgcacgcagtgagagtggtcgtggggacggctggcaagcggtgttttaggcatgagcggcgacagatatttgatagagacgttattatgttacccgttcctacgccatcgagtggtcatcgtgtcccgactttttcccgtttttgtcgtatttgtcaccagtttgttcgttgcgggtgccgctcaggccgaggtcaaggtgctgacgagcatcaagccgttgcagctgattgccgctgccgtgcaggacggggtggctgttccagaggtattgctgccgccaggggcgtcgccgcacaacttcgctttgcgcccatccgacgtacggcgtgtgcagtcggtggacctgctgtactggatcgggcccgacatggaaacgtttttgccgcgtgtgcttaaaggccgtacggcgccaacggtggccgtgcaggatctgccaggcatgaaactgcgcatcttcggcgaagatagccattctcatgccgacgaagccgacgaacatgaccacgatcaccgcccaggcagcgtcgatgcgcacctgtggctgtcgaccgtcaatgcgcgcgtgatcgccgcacggatggcggccgacctcagcgccgccgacccggccaatgccgagcgttatcagagcaatgccaaagccttcgaagaacgcctgaacgcgctggatgcgcgcctgaagcagcgtttggcgggcgtggatggcaaaccttacttcgtgttccacgaagcctttgattacttcgaggaggcgtacggcttgaagcatgcgggcgtgttcagcgtggccgccgaagtgcagccgggcgcgcagcacgtagcggcgatgcgcgcgcgtttgcaggaagtgggcaagacttgcgtgttcagcgagccgccgttgcgacctcgcttggccgaaaccctggtagccgggttgccggtgaagttggcggagttggatgcgttgggtggctataccccggcgacggcccagggttatgagcaggtgctggaaaaactcggcaatgacctcgccggttgcctggagtcgctctaacaggtaacacaaaaccctgtgggagtgggcttgccccaatgccagtcagttaagcggtcatcgcctactgtaggagcgagcttgctcgcgaaaaacgtcaacgataacgcgtgctcgctgaatgaacgcggcgcccgtaagtttttcgcgagaaagctcgctcctacaaaaaaccttaactgactggcattagggcttgcccgcgatagccataggtatctacacaactttgtaggctgtagcagccgacggtaaccacgatgcgacgcgagacgctcttgatcttgatctgcttttgatcttaggcgacccccaaatcactggcggattacgggcacaccgagcctgggcgaggtgccgagtggtggggcaagagcgttttgcttactttggcctgggccggcatcccggcttttgcaaagtgagccgccgtcagggcggaaccctaagtggccgttaccgcaggaatggatatgtacacggtccaactgtgttgactgtcaagccgtcttcgcaggcaagccagctcccacagttggatcgcggtgcgtcagttagatcagcgtcggctgccaggccgtcgcgggagcaagctccctcgccacaggtttagcgtcgtaccgaagttgtgtagatacctatgctgcgatgaggccatcggccccactgaaactctaaagaatcaccgccccaatcaacccacacaccacccccaccagcatggtcaacccggccaccgtcaccagcacccgcgcatcgaaatccttgcgcagcatcaacagcgacggcaggctcacgctcggcagggtcatcagcaaggccacggccgggccggtgcccatgcccagggccatcatggtttgtacgatgggaatctctgccgctgtcggaatcacaaacagcgtgcccacaatcgccagcggcaccagccacaccaggctgtcggccatcgccccgtccacatgagggaacagccaaacccgtgccgcgccgaggatcagcaccgccaggatatacaccgggatagtgctccagaacagctgccacagcgtgcgtaaccagcggctcaggaacggttgcgactccactgtgctgacgtcggcaacggcttccagtgcggcttccggcacgtggtccgggcgcgcaatacgctgtgccaccagggacacgcccaccaccagcacaatccccgccaccagccgcaacgcggtgaaaccccagcccagcacaaagcccatgaacaccagggtggccgggttcaataccgggttggcaatccagaacgccagcgccgcgccgaccgacacctgctggcggcgcatgcccgccgccaccggggccgcgcagcaactgcacatcatccccggcagggcgaacagcccaccgcgcagggtcgagcccagcccggcgcggccaaacaggcgcagcagccagtcgcgggggatcaacacttgcagtaacgagccgaggatcaccgccagtacggcggctttccagatggccaggaaatacacctgggcataggcgagagctgcctccaggggcgagctttgctggtcattgagaatcgaggcgccaatgctgtggttatcggccgctacaaacgccttgaggtagtagggcgaccacttcacatagtagaggccgatgcaggccaccaacagaaatagggcaggtttgcaccagaacgcccagccgcggctgggctgggtggaagcgaggttgggcatggagaggatccgcaggtgagtcgatagcctggcatcatacgcccctgcggcccaagcttcagatatctgcgctgacctgggtcgggtccgggcagttttccccgccgttattcagcccttgcttgtagttgcggctgagcagcgaagccttgccgttgtgccaggtcaatgtcagcacgtacagggagtcgtagtcattgccagaccaatcatcggtaatggtgtgtttttcgccagcggcttcgctggcgactttgttgatcagttccggcaagtaaccgtgggaccaggccgtgtagatggtcgcgttgcggtacttgtcctcgaccagttcttcggccagggcactggtgtcattcgctgagaactcgatattcaccggcaggccgagcttgatcgcgctggggctgatggtgatcagtgggcgaatgtagctgtaggagttatccagttcgccttcctcgacgttgcgtgtcgggttggcagcgaacacatagttggctttgccgaacttttccggcaacagggtcgccaggttcatggcgcggttcaggccctggcaattgagttggcccaggccaccggcgggtttttcaccatggcgcaggaataccagggtttgcacgccatcgaccggttgcgcacggctttcacgggcgtccagggcggtgacgatagcagcgctgaccagcagcagcggcaataccatgtaggaataacgtttgagtcgtggcacaaggcgcagaggcttgatcgtcatgataggttcgagtcttcgtgcgtcgggttaaggcggacaagcccggccccagtgacgcatcagcgtcctgcggtgttccctgtcgatatagcaagcagcctccattcattgttcgggcgctctttaagagtgcattcgggcgctttggttcgcccacgcgggatactagccggcaaatgttgcgcaacgatgacccatgcacgacggcaggcagatgactatgatggggctttccgaccagggggttctcgatgaacgcactcgccgctttcccgatcaatagcaaatggcccgcccagcacccagaacgcctgcagctgtattcgctacccacgcccaacggcgtcaaggtgtcgatcatgctcgaagaactgggcctgccttacgaggcgcacaaggtcagcttcgacacccaggaccaattgtctcccgagttcctgtccctgaaccccaacaacaagatccctgcgattatcgaccccaacggcccgagcgggcagccgctggcactgttcgaatccggcgcgatcctcgtttacctggcggaaaagaccagccagttgctctccgaagacccggccacccgctatgaaaccctgcaatggttgatgttccagatgggcggcattggcccgatgtttggccaactggggttcttcaacaaattcgccggcaaggcttatgaggacaagcgcccgcgtgatcgctacgccgccgaatcgcggcgcttgctgggcgtgctggaaaagcgcctgttgggccgcacctggatcatgggcgacgagtacagcatcgccgacattgcgacctttccgtgggttcgcaacctgatcgggttctacgagtccggtgacctggtaggcatcaccgatttccctaacgtactgcgcgcgttggacggctttgtcgcacgtcctgcggtgatccgtggcctgaacattccgagctgaagcatgtcgactttcgattttcaacaactggatgtattcagcagcgtgccgctcaaaggcaaccccttggccgtggtgctgggggccgatagcttcaccgaccagcagatggcggactttgccaattggaccaacctcagcgaaaccacgtttttactgacgccgcgcgacccacgtgctgactatcgggtaagaatcttcaccaccctcaaagagctgccgttcgccgggcatccgaccttgggcagttgccacgcctggttgcaggctggcggcgtgccacgtggggaggagattatccaggagtgcgaaatcggcttggtgcgtattcgtcgccagggtgaccaactggcgtttatcgcgccgccattgttgcgtgcagggcccgtggaggcgccgttgctggagcgcgtgcgcctggctttgaagctggcgcccgaggcgattgtgcgcagccagtgggtcgacaatggtgcgggttggctggcggtgatgctggctgatcgtgacgcggtgcttgcgttgcaaccggactatgcgcaactgctgggtctggccgtaggggtgatcgccccctgtgatccgacgcgtgatgcggtggacgcgcactttgaagtgcgcgcttttgtcgctggcgatggcgccgccgaagacccggccaccggcagcttgaatgccggcgtggcccaatggctgctcgccgagggcctggcgcccagccgttacgtggtcagccaaggcacggcgattgggcgagcggggcgtattcatatcgagcgccagggcgatgaaatctgggtgggcggcgccgtagcgttgtgcatcgaagggcgtctacagctttagatcaatgaattgttacgcacccggcaatacactattggcccctcggcatttgtgttgccgggacttgggggcataagctttcgccccaaagtgttcagccatttttcaggattgccatgaccagccagttcccccaagcccgtccacgtcgcctgcgccgctccccggaattgcgtggcctgttccaggaaagcgaattcaccctcaacgacttggtactgccgattttcgtcgaagaagaaatcgacgacttcgtgcccatcaccagcatgccgggtgtgttgcgcattcctgagaaaaaactcgccggtgagatcgagcgttacgcccgcgctggcatcaagtcggtgatgaccttcggtgtgtcccaccacctcgacgccagcggcagcgacacctggaaagaacgtggcctggtttcgcgcatgtcctcgatcatcaaggacgccgtgccggaaatgatcgtgatgtccgacacctgtttctgcgaatacaccgaccacggccactgcggcgtgatgcacggcgcccatgtcgacaacgacgcgaccctggtcaacctcggcaaacaagccgtggccgccgcccgcgccggcgccgacgtgatcgctccgtccgccgcgatggacggccaggtccaggccatccgccgcgccctggatgacgccggcttcacccacatcccaatcatggcctactccaccaaattcgcctcggccctctacggccccttccgcgaagccggcggcagcgcgctcaagggcgaccgcaaaagctaccagatgaacccaatgaaccgccgcgaagccgtgcgcgaatcgctgctggacgaacaggaaggcgccgacgcgctgatggtcaagccagccggggcctacctcgacatcatccgcgacatccgcgaagcctcgcgcctgccggtggcggcgtaccaggtgagcggtgagtacgcgatgatcaagttcggcgcacaggccggggcgattgatgaggaccgggtggtgcgcgagacgttggggtcgatcaagcgggcgggggcggatttgatatttacgtattttgcgatggatttggcgttggcggggatttaagggcgtcgctgaacctgtggcgagcgagcttgctcgcgtggggctgcctagcagcccccgtagctggttacatcgatgtagctgaatgagatcggcgtactgatggattttattttttaagtaaatgcgtgtcgaatttttccactatatggtggagccataacggccctgatgcccattcatttgggtagtaatagaaacagtactgtttgtgcagcaagttttcttggaactctgattcgtttgtgtaggagtcaatcaattctagaatctcattccttacggtgcagatcacgtctgtggacgagtccattagaaaactatcaatgacgtcgtcggcgcaggcgtgatcctctacccagtcttgattaaagtaggcgccaaaaaattgctgaagctcagttaatggtatgttcatttttatattgggtatcctgtaagtaaaaggtagccatttggcatttttggtttttttattaaaaccagaataaatttatatacggggactgactctgtgctacctcttataacgctcaatcccacagggctgctcgagtgttctctaatgatatgcttgtctttttttcctttgagaaatttggatatttcgtgatgatgtgtggataagctttcagtaacgagcgcttctgcttcctctaaagttttgaatgtggacgctgctggtatattcggttcccattcaagcctttcagctaactgaatatatgtctgtcctatatgttttttgattaagtgcccaccagatttttcgtgtgcaactagtacgccgctggataatttttttgtgtggactaaatcgaattttgagccagggcatactccaatcttacaacttagtcccagcgggtctacccaacctgtcggattgggcacgtactggtacccattgatcccccccgccaacttcaccgggtccggtgtcaggtagcgaccaatatccggattgtagtagcgatggcggttgtagtgcaggccgctttccgcatcgaaatactgcccttgaaagcgcagtggattgtcgattttgcctacgtcgagccgggcaatatggccgtaggcgcggtagtgggcggaccagacgatttcgccttcggggctggtgagttcctgcggggtgccgaggtggtcgagttggtagtggtagggcgttgtggcgtgtgggccgaagccttccagtagcgccaatgggcggaagctgtcgggttcgtagaggtagctgcgatggcagtcagcatggtgctcggcaatcagcttgtcgccttgccagaaaaactcggtggtcttgccgtcgacggttttgctgatgcgccgtccaaacgggtcgtagcgatagctggcggtctggccgttgggttgggtgatgccgatcagccgatgctggcagtcgtagtggtattcggtgacgagttgctggcctttaccgcgtcgttcgcggatgaggttgccgaaggcgtcgtagtcgtagtggcggtcgccttggatcatcaggcggttggccgcgacgatgtccgggccggggcggtcttgcatcagcaggttgccggccgggttgtggccgaagcgttcctgcacgtcttgggagtggtcggcgcgggtcaggcgggcgagcgggtcgtagtggtagcggtgctcgcctttgcgggtgtcgagcaggcgggtgaggttgccggctttgtcgtannnnnnnnnnnnnnnnnnnnnnnnnnnnnnnnnnnnnnnncataggtatctacacaactttgtaggctgtagcagccgacggtaaccacgatgcgacgcgagacgctcttgatcttgatctgcttttgatcttaggcgacccccaaatcactggcggattacgggcacaccgagcctgggcgaggtgccgagtggtggggcaagagcgttttgcttactttggcctgggccggcatcccggcttttgcaaagtgagccgccgtcagggcggaaccctaagtggccgttaccgcaggaatggatatgtacacggtccaactgtgttgactgtcaagccgtcttcgcaggcaagccagctcccacagttggatcgcggtgcgtcagttagatcagcgtcggctgccaggccgtcgcgggagcaagctccctcgccacaggtttagcgtcgtaccgaagttgtgtagatacctatgccgcgatagcgttggctcagtcgataccgctatcgcaggcaagccagctcccacattgaccgagtcggtgttttaaagtgcgaacggcaggtggaccgtgacctgctgacgctgcgccaagcggtgctcgaactcagccgggtcatgaatcaacacatcctgcccggcaaatgactcggccgcgatcagccgcgacagccagaaccgcacgcacgccacgcgcagcatggtcggccatagctcggcttccttcgcggtaaacgctcgtagccctgcgtaagcgcccagcagcgcccgggcacggtggccgtcaatcacgccctcggcatccgagcaccagtcattcaaggcgatggccacgtcgtagagcatcggccccgaacaggcgttgtagaagtcgatcaggcccgtcaggtgcgtgccttcaaacatcgcgttatcgcgaaacagatcggcgtgcacattcgcccgtggtaggccgaggatgtcggccttgtgggcgtcgatctcggccagcgcatcgcgcaacaggcgttgctgggcctcgttaaggtgcgaaataagctgcgcgccctcgctgagcatccactccaggccgcggtcggtcttgcgttcaagtaccttttcgccttgggtggccaggtgcaggtggccgagcagttcgccaacctgggcgcaatgctgcgcattggcctccttgatgtgcttgcccgccagacgtggttgcagcaaggccggtttgcccttgagttcgcgcaaagcgatgccgtcggtggtgcgcagggcgtacggcacgggcaggtcggcgtcgtggagcacgtcgagcagttcgatgaagaacggcatttctgccaccgggccacgctcaaccagggtcaggacgaactcgccctgctccaggctgataaagaaattggtgttttcgctgccggcggcaatcccctggaaatcaagcaggcggccgagcccataaggggcgagaaaggtttccagctcgggccgagccaggggggtgaacacagacatggttaaaactgccgttacgggcgctgcggtgggcagcgccggttaaaattaagaaatcatttccattcgaagatcttccatgacgggatcagcatatccggctggtcagagcggatgaagttcgcgtcggtgccgtccgcacgtaccagaaagtacggcggtgcgcctttcggggtgactttgattgcgtacaggaagccgttctggcggtattcctggatggttttgtcgccttccgtgcgaatggtaacttccgggtctgccgacggggcatcgtctgccgccatggcagccatcggagcgagtgcaatcaaaccggtcaacagcaggcgattgaatgtacgcatgataaccttgtccctttgttttcattggtccggctattctagcgcctgacccgccgaaaaggttgatcctgctcatgagccaagcgcccctcgtcctggtggacggttcttcttatctgtaccgcgccttccacgcgctgccaccgctgaccacctccaaaggcctgcccaccggtgcggtcaagggcgtgttgaacatgctcaaaagcctgcgcaagcagtacccggacagcccatttgccgtggttttcgacgccaagggtgggacgtttcgcgatgagatgtacgccgaatacaaagccaaccgcccgagcatgcccgatgacatgcgcctgcagatcgagccgctgcatcaaagcgtgatcgctcttggcttcccgttgctgtgcgtcgagggtgtggaggccgatgacgtgatcggcaccctggcccgcagcagcgcggccgccagccgcccggtggtgatctcgaccggtgacaaagacatggcgcaactggtggacggccacattaccttggtcaacaccatgaccggtagctccatggacatcgagggcgttaaggagaaattcggcgtcgctccggagcagatcatcgactatctggcgttgatgggagattcgtccgacaacattcccggcgttccgggcattggccccaagaccgcctccggcttgctggtgggggtcaatggcggcctcaaagagctttatgagcagttggatattgtgccgaccctgcctatccgtggggccaagaccctgccggccaagctggaagagcataaagagatggcattcctgtcctatcagttggcgacgatcaagatcgatgtgccgctggatgttgggttggatgatttacacctgatcgaaccggaccgcgaaaagctgcttgagctgtacacattgctggagttcaagagctggtacgacgagatccagcgcgataccaagcgtgtcgagctgaaggcggccaatgaagttgcgcccgtcgcgggtgtcgcagtggaggcggtggtatcggtgcccgtagagacggtttacaccaccattcttgaccaggccacgttcgatctgtggctgaaaaaactcaacgacgccaagctgtttgccttcgataccgaaaccaccgggatcgacgcccagcaggcgcaattggttggggtttcgttcgcggtgcagccccatgaggctgcctacattccgctgacgcacgcttacatcggtgcaccggaacaactggaccgcgacaccgtgctactggccttgaaaccgttgctggaagacccgaccaaactcaaggtgggccagcatgccaagttcgacatgaatatcctggccaactgcgccattggtggcgaccctgcccagggcattaccgtgcgcggcatcgccttcgacaccatgctcgaatcctacgtgctcaactccaccgcgacgcggcacgatatggacagcctggcgaagaagtacctggaccacgacacggtaagcttccaggacatcgccggcaaaggcgccaagcaactcacgttcgaccagatcgcccttgagcaagccggcccttacgcggccgaagatgctgatgtgaccttgcgcctgcatcagtacctttacgcgcaactggcagcgatcccgagcctggccagtgtgctgacggacatcgagatcccgctggtgccggtgctggcccgcatcgagcgccagggcgcactggtagacaaggacctgctcggcatccagagcatcgagctgggtaacaagatggttgagctggagcgccaggcctacgagatcgccggtgaagaattcaacctgggttcgcccaagcagcttggggcgattctctacgaaaagcttggcatgccggtgctgaaaaaaaccggcaagggccaggcctccacggctgaagaagtgctggccaaactggccgaagatgatttcccgctgcccaaggtactcatgcagtaccgcagcatgagcaagctcaaaagtacctataccgaccgcctgccggaacagatcaacccacgtaccgggcgtattcatacgtcttaccatcaggccgtcgcggcgaccgggcgcttgtcctccagcgatccgaacttgcagaacatcccggtgcgcaccgccgaggggcggcgcattcgccaggcgtttgtcgcgcccaagggctacaagctgctggcggcggactattcgcagatcgagctgcggatcatggcgcatttgtccaaggacgagggcttgatgaacgccttccgcaatgacctggacgtacacacggccacggcggccgaagtgttcaaggtcgagttgaatgaggtcacgtccaaccagcgccgcagcgccaaggcgattaacttcggcctgatttacggtatgggcgcccagaagctgggtaaggacatcggcgtcgataccaagaccgccaaggcttacatcgatgtgtacttcgcccgctatccaggggtgcgcgaatacatggagcgcacccgcgcccaggcggcggatctgggctatgtcgaaaccttcttcgggcgacgcctgtacttgccggacatcaactccaacaagccccaggagcgcgcggcggccgaacgcacagcgatcaacgcgccgatgcaaggcacggcggcggacatcatcaaaaaagccatggtgcaggtggataactggctgactgagtcgggcctggatgccaaggtcatccttcaggtgcacgacgaattggtgctggaggtgcgcgaagacttggtcgcgcaggtcagcgagaagattcgcgagcatatgagcgcggcggcgcagttggacgtgcctttggtggtggacgtaggcgtaggcgataactgggacgaggcgcactgattctgcggcttcgccatcaccttgcgcggtggcgaggcggtttagagcgcaaaccgcggtcagttatttccaatagttttttgagcctgtcggaacttaacctgtgaactgccactcagagttactgaatgggtggtgaagcccttcaatgctcctatgttgtgttaagtgttggcagataattccggaccccgccctagcggtccggaacttgaaccccgaacttcccctccccaaaagaagtccggggttttttttgcccgcagaaaagttattcggcgatttctgtgcccttgtccgccaattccatccagccggccagtacggtgtaagcctcttccagacccatgcgcttgggggcggagaacagctgaatggtgatggtgtcgccccaacccttacggatttcggactgcactttgagcagggtgttcttggctgcaccgtaggtgagcttgtcggccttggtcagcaaaatgtgcatcggcatgccgctggcgacagcccagtcgagcatcagcaagtcgaagtcggtcattggatgacgtatatccatcatcagaatcaaacccttcaaactctcgcgaccgcccaggtaagcctcgaggtgacgctgccagtgcagcttcagcgggataggtacttttgcataaccgtagcccggcaggtcgaccagacgccgatcatcgtctagcttgaagaaattgagtagttgcgtgcggcccggggttttcgaggtgcgcgccaggctggcgtgggtcagggtgttcagtgcgctggatttaccggcgttggaacggccggcaaaggcgacttcaaagccctcgtcatcggggcattggtccactttggcggcgctgagcatgaaggtggactgttggcacaggccgaggatggggttcttgagttgcatgagatttccgatgtgggcggtgccgagaaagggtgcggcaagcggtgtcgtttccgtttcagtagcgccagtatataatgccgcagattttgtgtgtgctttgtcccagcgaaggatgaagttcacgggagcgaaagacctttattgcgcattagaacgcaaaacgctctcaaaccctgaaaaggtcgatgtatggaccgacggttgctcgcttctgctgccctgattccgctttacggcgctcaggctacacaggatcaaccgagtttgcatggtcaggctgacgcagcacgtgacccagggtttcaaggcaatgccgccgcgtggtttgtgcatggactgcagtactgaggattaccaggccgtcactgatgtgatggtgagtaaacccggtagataactcttaaacccttagccgtagttggattagctgatgaacaaactgatcgtgagtctgctgttgaccttgggcatcacaggcgctgccgtcgctgcagagggccccgtcaaaggtgatgccactgccggtcaagcgaaggccgccgtgtgtggtgcctgccacgggccggatggtaacagcccggcgccgaacttccccaaactggccggccagggtgaacgttacctgagcaagcagatgcacgacatcaagagcggcaagcgcacggtgctggaaatgaccggcatgctaaccaatctcaacgatcaggacctggcggacctcgcggcgtattttgccagccagaagggtagcgtgggagctgccgatcctaaattggtcgcccgcggagagcagttgttccgtggcggtaacctggaaaaaggcttgcctgcctgcaccggttgccactcgcccaatggcgcaggcaacgctgctgccagcttcccgcgcctgagcggccagcacgccacctacatcgccaagcagttgaccgactttcgcaaggaagaagccggccgggccaacgatggcgacgcgatgaccatgcgcaccatcgctcgcaagctgagcgacgaagacatcgcagccctctccagttatatccagggcctgcactgacggggctgggcgttaacgctcgattaatcccgcgatgcaagcataaaaagggtggcttaggccgcccttttttgtggccgctgccgttacactaacgaactcatgtccgcgtagacctgtcacaacaaaggtcgcgtgaggcgactttatttgtccaggagtaaagcatgcgtaatctgatcctcagcgccgctctcgtcactgccagcctcttcggcatgaccgcacaagctgccgatgtgccgcttgaagccggtaaaacctatgttgagctggctaacccggttcccgttgcagtgccgggcaagatcgaagtggtggagctgttctggtacggctgcccgcattgctacgccttcgagccgactatcaacccatgggctgaaaagctgcccaaggacgttaacttccgtcgcattcccgccatgttcggtggcccatgggacgcccacggccagctgttcctgaccctggaagccatgggtgttgagcacaaggtccacaacgctgtcttcgaagcgatccagaaacaaggcaagcgcctgaccaagccggacgaaatggctgacttcgttgccactcagggtgtcgacaaggacaagttcctggcgaccttcaactccttcgctatccagggccagatcaaacaggccaaggaactcgcgcagaagtacggcgtgcaaggcgttccaaccctgatcgtcaacggcaaataccgtttcgacctgggcagcaccggtggtcctgaagcgaccctgaacgttgctgaccagctgattgccaaagaacgcgctgccaagtaaggggctcgccatgcgccgctggggtaccgagcgtgtcgttggcctgcatgagccgcaggtcaacgagcatcacctggagtccacgggcctgccggcagacagccgcttgcgcctgctcagcttcaacatccaggtgggcaacagtaccgaaaagtatcggcactacctcacgcgtggctggcagcacctgctgccccacaaggggcgtaccggtaacctgcagaaaatcggcgacctgctcagcgacttcgacttggtcgccctgcaggaagccgacggcggcagcctgcgctccggctatatcaaccaggtggaacacctggctcagttgggtgcttttccgtactggtatcagcaactcaaccgtaatctagggcgcctggcacagcacagcaacggcgtgctcagccgtctcaaacccactgccattgaagatcaccccttgccaggccccaaagggcgcggggcgatccttgtgcgttttggcgaaggcccggaagccctggtggtggtgatgatgcacctggccctcggggggcgtacgcgcaacctgcaactggcctacgtgcgtgaattgattggcaactacaagcaccaggtgctcatgggtgacatgaacacccatgccaacgacctgctgcagaattctccgctgcgcgacctggggttactggcgccgcaagtcgaagccacgtttcccagctggcgcccgcagcgctgtcttgaccatatcctgctcagcccaagcctcacactggaaagtgtgcaggtgctggcgcagcccatttccgatcacctgccggtcgcggtagagattcgtctgccgggctcgctcacggctgatgcattacccgcgttgagcccaggccctcgcggaccccttgcatgagcgacgacgcccagcgctggaaagagaaatacctccaaagcatcgagcaacaagacaaactcgaacgccgctgggccgcccgcctcgatttgctgcgccgcgggctggtgcgcagcacgctggccgctgaagggactgaccgcgccgtcgatcaatgcatgaaggaaatgcgcgatgttgtgcgcacggacgacatggacgctgctctcgccgctttactgccgcgcctggaaaaggccgtgctggattcggagcaacgccgcgaaacccgcgtcgaccagatcagcactgcgctcaccgccttggtcacccagttgcaaaagctgccgctgccccgcgaggtggctcgtccgctgaaaaccttcgccaagcaactcgatggtcgcgtggcacaagcgcgggagataccgctgctgctcagtgagctgagcagcctacaggggcaggcgctgaataatctggagccggatggcgaaaccacacgcccagggccgggactgttgcaacgtctgtttggcagtaaagaggccgccagtgaagcgcctcctgttgatgccgagccactgccagcagcgcaatcggcaccgccaacgcccgcagcgcccaaacccacacccaaaccggaagaacctgggcaatcggaagaattgacccaagccttgcgtgcctttgcgccgttgccacccttgaagcctgtgcctgttgcagtggccgaagtgcaagaggtcgccagcgaaacgccggtattcgacgctccagagctgccgtcgattgcggcgcctgcgcaactacctgaacccgacgtgcaggcgccgccagttgcggagcctgctcacgaaagcgcactcgccgcctttatcgaaccgccgccggttccagtcgaaacgccggatgagacccgcatcggcagcctgtcgctaccacccgtgcaggaaagccccgagcccgacgagctgcaaccggacggcacctacgccctgcccgattcgcctgaaccgtcctacagctcggtggccaaacacattgaaggcactttactcggcctgctggaagatctttccctgcccgaacgtcaccaaccccaggccgaggcaatgcgtgagcgtctcgcccacggcttgaactggtacgaactgctgccgatcctcgatgacctggcggtgctgatgctggcgatcaccgacagtggccagcatgagttcgaggcttatctcaagcagctcaacgagcgtctcgaggcattccagggccatctgcaggtcgccagcgagggccacgccgacagcagcctggccgcgcgggagttggacacgcagattcgtgagcaggtcgacggcctgcaaagcagcgtgcaggacgccgccgacctggacagcctcaagcaggtgctcgaaagccaccttgaaggcttgctcggcaccatggacgaacaccagcagcagcgtgacctgcgcgagcaggaagtggccgcacgcctcaaaggcctggctgaacgcgtggcccatatggagcaggaagcccagggctaccgcgagcacctggaggtgcagcgccagaaggccttgatcgatccgctcaccggcttgcccaaccgtgcggcgtggagcgaacgcctcgattacgaagtcaacgcgtggcatcagcggggtaacagcctgtcgctggccatgcttgacctggaccacttcaagcgcatcaacgacggttacgggcacctggcgggggacaaagtcttgaagatcatcgccaatgtgctgagcaagcgcctgcgaccgacggacttcatcgcgcgttttggtggtgaagagtttgtgctgctcatgcccgactcgaccttggcggatgccttggccgtaggtgaagtattgcgtgaggccattgccgcgtgcccgttccacttcaagggtgagccggtaacgatcacggtgtccatgggcgtggcgcagtttcaacccggcgagcgcagtgacctggcgctcaagcgtgccgatgaagcgctctacagggcaaaggccgcggggcgtaatcaggtgcaggcggcataaaagatgttccattttgtaatttgaccgcctggccgtgagtcgtacgttacactgttgcattatcgtctttcagtgtactgcctctcgccatgaaatccttgtatatcgctttagcgtttcttctgctcgccggctgcgccaatggcccgcgcctgaacaccagccatccttcggtcaaccacgacaatcgcgtgcagttcgttgtggtgcattacacctcgaccaaccttgaacgttccctggcgctgttgacccatggccaggtcagcagccattacctgatcggcgacgatgcctccggcaccatctacaagctggtggatgaaagccagcgcgcctggcacgcgggggaaagcgagtggatggggcgcacctggctcaattccagctccatcggtatcgagatcgtcaacccagggttcagcgataccccgacggggcgtgtgtggtacccgtattccgaagcgcaggtgcagtcgctgatcgtgctgctcaaggacatcagcaagcgtaacggcatcgacccgaagaacatcatcgggcacagcgatatcgccccgctgcgcaagctggacccaggcccgttgttcccctggaagcgcttggcggcagaaggtctggccgtgtggccggatgcccaggcagtggctcggtttcaggtgcagtacgccgcgcagttgccgagcattacctggttccaggaagagctggcgcgcctgggctaccagacgccgcagactggcgagctggatgtggccacgcggcatgtcatcgctgcgttccagatgcgctttcgcccgtcattgtttgatggcaccccggatgctgaaagcgccgcgatcctgcgggccttgaatcaccgctgatggtgtaaaaataataatgtaggagcgagcttgctcgcgaagaacgcatagacgacgcgggctgcctgacagcacagcgttatcgttgacgtttttcgcgagcaagctcgctcctacaggggcaatgccatatagaactgcgtgccctgtcccggccgtgagtacacgcccatgcggccgccgtgcaattgcacgatttccttgcacagtgccaggcccaggcccgcaccgcctttcttgcggcccacctgcacaaagggctcgaagatccgcccttgctggccgtaggcgataccttcgccgttatcctcgacgctgataatcacccgctcgccatggcgtcgtgcctgcaggcggatctgcccgccttcggcggtgtgcctcagggcattgcccagcaggttgtcgagtacccgctccagttgcacctggtcggcatatagccgtggcaactcaggttgggcttccaccagcaactcaatgtgctgggcgttcgcaggctcagcaaatcgagcccgtgcgtgctccagcaagtcggtgacatcgcacgtgcccaaggtgagtttttgcaggccgttctggtagcgcgagaagttgagcaggtcgttgatcaactgcatcaggcgctgcatctcttcattgaccgtatccagcaggtccgcctcacgggagtccggtgggaacttggcccgctcacggaataggccgaaggccatgtgcatgccggtgaccggcgtgcgcagctcatgggacgcgcgcaacacgaactcgctgcgcacccgctcgaaggcgcgctgttcagtcacgtcatgcagcaccatcacggcccccagaatatgcccctgggtatggctgaccggggtcaggctgtaggtcagcaggcgcaattcaccctcgacttccacttcgagatcatccggggcccgctccaggttgccgccgcgcagcaccagttgcagctgttcatccatttctgcgcgacccatggcttcgccaagaccttggccgagccgctcctcatcccagcccaattggcgctgcgccacagggttgaggtgctccaggcagccttggcgatcaatcatcaacaggccgtcatcgatactgtcgagcaccgcttgcaggcgctgttggccggccagcagctcatcgatgtttgtggcctgatgttggcgcaacgcttcggccatgatgccgaaacggcgggtcagcaggttcatttccgctgcggaggagatcggcagggtgacttcgaaatcgccctgcccgatcttgtcggcggccttggccagcgcctcgatggggccaccgaagcgccgggcgatgccatgggccgtgacgaaaccgatgatcagcaccgcgagccctaccagcccgagcaggccggcaatcaacaacgcgcgctcgcgggatttatgctcgctggtactgatattttccagcgcccgcttgtgatcggcgatcaggccgttgcgcaatatgttgaaggtttcagtcagcttttctttgctgcctgcgggcggtgatgcctgttgggattggtcaaacgcttccagtagcttctggtaatcggagcgtgcctggctgaagccatggtttgtgccgtcgacctgctcatgggcgatgccctggtccaacaggtcgaaataatgttgcttggaggcttgcagggcgtccgggtcggggcgcttctccagcatcatgatcaactggtcgcccaggctctgacgcaacttgagccccaggtccagggtgatgaagttactgcggatcagcgattcctgagtcttggccatttgcatgacactgaccaagcccaggatcaaccccagcaatgccacggtgatcagcgctgagatgctcaggaataaccgggtgcgcagtttcatcgcgagcttcataaggtcctgttcaaaggttgtactgcttgcgtttgcggtacagcgtcgacgcatcgatgccgagtgtgcgggccgcttggtccagtgtgtcgctggtcgcaagtacggcgccgatatgggctttctccagctcatccaggctcaaagccgcgccgatacgcggtgcattgttggccggttgctcggccatccccaggtggctgatctccaccttttcctgagggcagatgatgctggcgcgttccaccacgttacgcagttcgcggatgttgccgggccagcgataattgagtagcgcttcgcgggcattatcactgaagccgcgcgccggtcgtgcgtattccttgacgaagcgggcgagaaagcggtcggccaaggtcaggatgtcttcactgcgttcgcgcagcggcggcaagtgcaaggtgatgacattcaggcggtagagcaagtcttcacggaagcggccatcgcgcaccatgtcttccaggttcaggttggtggctgcaaggatgcgcacatcggctcggcgggtgaccgggtcgcccacccgctcatactctttgtcttggataaaccgcagcaacttgggttgcaacgtgagggggaaatcgccgatctcgtcgagaaacagcgtaccgccgtccgcctggttcactcggcccagggtgctttcactggcgccggtgaatgcgccgcggctatggccgaacagttcgctttccatcagttcggcggtcagtgacgggcagttgatggtcacgcaggacttcttcgagcgcttgctccagccgtgtatcgcccgggccaactcacctttaccggtgccggattcgccgagaatcaagatattggcgtccgtcccggccacctgccgcgcggtttccagcaccaccatcattgccgggctatgggagtccaggccgtctttgggctggcgcacctcgccttccagcgcttccagccgcgccgagagctgacgcacctccagttgcttggcggtggccaggcgcagttggtctgggctgcaaggtttgaccaggtagtcggcggcgccagcctggatggcgtccacggcggtatccacggccgaatgggcggtcacaatcaccacgcgcatccacggtgcctgcacccgcatctgggccagcacgtccaggccattgtcctcgcccaggcgcaggtcgaggaagcacaggtcgaacacctgacgctgcatcagggcatcggcctgagcggcactgttcgcggtggcgacggtatagccttcatcttccaggcaatagcggaaggtgcgcaggatcgcagattcgtcatccactaaaagaatgcggccttgaagttccttggctgattccatctgtcccgcactccttaactataaatgtgatggtgtttagtcccggaataatcgggcaagttgcatggtttattctgattcataaaaggcttcttcgtgcagctatctgcgcgccttcctacagacgtcgtctgagcgcattttcccttccgttcgcccttcgatccttcgatgtgtgcgctgggttgctggttccgaccacttgccatcgtgcatttcgcacggcctgcaaggaggcatcgtgcaggatgctaggcgacgaatctattgatcaagtgtaagcatttgattttattgagttttattttgcaataaagctggcatgcactctgcaatatctcccccaagagcgtcatgaacgaataatcagaatgcgggagcaatgcagtatgactcgccaaagcctcagccaattgcgtgtatcgccgctgcgcttgcagcagggcctgtttgccagcctggccttgatggtcacgttgattgctggccagcagttgcagcattggcaagagcgcgcgcagccagccccgcaatttgaacgtcctgccatgacccagactcattttcgttccattggcagcgccagcgccgatgtgactgccccgcaattgagcctggtagatcagggttctaccctggacgaactaccggcccatgaccgttgggtgttctaggcaaaaaacgtcgcttgtgttgagcggctgcacggcatcaccgctgttacccctatagaagagaagcataaggagaatcaccatgttgagttgggcaatcacatttctgatcatcgccattgtggctgcagtcctgggcttcggtggtatcgctggcaccgctaccggcatcgccaagatcctgtttgtggtcttcctggtgatgttcatcgcttcgttcttctttggtcgcaaaggccgaggttgaatatggccaacctgccttttaaagcccttgctgccgccctgctgttgggcggtagcggcttggccttggccgccaatgacggccaatcccgggctaacgaattgctcagcgcggatccgcagtaccgtgaaacctggcaagacgtggtgaagaaagaagagcgcctgcccgagtgggtgatgaacctgtcgggcacggccgagcaaatgaatgccgttgaggaagatggcgacaagtacttggtcgggccgctctgcgaaaccgcagatacctgcctgaacaagcgcctgatcgttgccttcagcctcgacaaggaagatgcctacgccatgttggtggaagtcccggccggtttgccggcggacaagtccccgacgcggcacgccgattaccgttttatcggtaagccggacgagggtatgcaaaagctgctgatggagcagctcaagaaagatccgaattggtactaggttccgtctgacggagccggcgtccatagaaagaagcccttgtgcttctttctgtttgcatcgctccttgagtgatgcatgaccagggggccgggttgctctgatcgatcaggatcggcgtgacctacgggtacagggagtacctgcgcaagggccgggtcaggcgaaaagctgcgacgcaagttcacaagacctcaagcttgctgaacttgcggcgggcttatcgctctcatgctcgcgtttcatgccgcccatagccgcagttttgctttttgcctctggccaaccattaccgggtatgtcggcgtgaccatctatcgagaatttttcatccgcgctataggatctttctggcgctaggtgatggatttctcagacatttctgccaatcaatcgaagtcgtccagtatctctgagcgagcctgatttggccgcttaacggcatattcacccgctcgaatggcggatacgaactgaccgtttggacaaatattttcaaaaaaagccatgccgattcggcatagggtaggcgtttacggcattagacgccgctcccttgcatgggaatagttgcgccttttttcgcctgccagtaagccatttcggccacgctgcggtgaccttccatggaggcagatgcacacactttttcgctctcgagcgttgcagctggcgcatttgccgtaagtccacttgaagcaagggtaatgacatgaagaaggcaaagctaagcctcgcctggcagatcctcatcggtttggtactgggtattgcaatcggtgcagtgctcaaccatttcagtgctgaaaaggcctggtggatcagcaatgtgttgcagccagcgggcgatatctttatccgcttgatcaagatgatcgtgatcccgattgtgatttcttcgctgatcgtcggtattgccggtgtcggcgacgcgaaaaagctcggtcgtatcggcgtcaaaaccattctttacttcgaaatcgtcaccaccatcgccatcgtggtgggcctgttgctcgccaacctgttccacccaggcgctggcatcgacatgagtaccctgggtaccgtcgatatctccaagtaccaggcgactgctgccgaagtgcagcatgaacatgcgttcatcgagaccattcttaacttgatcccttcgaacatcttcgccgctgttgcccgtggcgagatgctgccgatcatcttcttctcggtgctgtttggcctggggctgtcgagcctcaagcctgagctgcgcgagccgctggtgaccatgttccagggcgtgtccgagagcatgttcaaagtcacccacatgatcatgaagtacgcccctatcggtgtattcgcgctgatcgcggtgacggtcgccaacttcggcttcgcctcgctgctgccactggccaagctggtgatcctggtttacgtcgcgatcctgttcttcgccttcgcggtactgggtttgatcgcacgcctgttcggcttctcgatcctcaagctgatccgcatcttcaaggatgagttggtattggcttactccaccgccagctccgagaccgtgctgccgcgtgtgatcgaaaagatggaagcctacggcgcgccgaaagcgatctgcagcttcgtggtgccgaccggttattcgttcaacctcgacggttcgaccctgtaccagagcattgcagcaatcttcattgcccagctgtatggcatcgacctgtcgatcggccagcaactgatgctggtactgaccctgatggtgacctccaaaggtatcgccggcgtgccgggcgtgtccttcgtggtgttgttggcgacgctgggcagcgtgggcatcccgctggaaggcttggcgtttatcgccggtgtcgaccgtgtgatggacatggcgcgtaccgccctgaacgtgatcggcaacgccttggccgtactggttatctcccgttgggaaggcatgtacgacgatgccaagggcgagcgctactggaattccctgccacactggcgcagcaaggaagccctgcctacggcacaagccacccgtagctgattaccaattgatcgaaaacaaaccccggagaattccggggtttgtcgtttctgccagccccgttatcattcgccccatctttcgggggacttatctgatgctcaatggcctgtggcttggcttctttgtcgtggcaatggtgtcagcactggcgcaatggctggtgggcggtaacgccttgatcttcgcggcgatggtcgaaagcattttcgccatggccaaattgtcggtggaagtcatggtgctgctgttcggtaccctgacgttatggctgggttttctgcggatcgccgaaaaagccgggatcgtcgattggctggccaaggccctgggcccgctgtttcgccgcctgatgccggaagtgcctgccgggcaccccgcgattggtttgatcaccctcaactttgccgccaacggcctgggcctggacaacgctgccacgcccatcggtctgaaagccatgaaggcgctgcaagagctcaaccccatccccaatacggcgaccaacgctcagatcctgttcctggtgctcaacgcctcctcgctgacgctattgccggtgactatcttcatgtaccgcgcccagcaaggcgctgcggacccgacgctggtgttcctgccgatcctgttggccaccagtgcgtcgacgctggtgggcctgctgtcggtggcagtcatgcagcgcctgcggctgtgggacccggtggtgctggcctatctggtccccggcgcgttgatactgggtggcttcatggcgctgctggcgaccttgtccgccacggcgctggccggtttgtcgtcgatcttgggcaacctcacactgtttggcttgatcatgctgttcctggtgatcggcgcgttgcgcaaggtcaaggtgtacgaggcctttgtggaaggcgccaaggaaggctttgacgtagccaagaacctgttgccctatctggtggcgatgctgtgcgcggttggcgtgttgcgtgcctcgggggccttggagttcggccttgaggggattcgccatgtggtggcctggacgggcctggatacgcgctttgtcgacgcgctgccgaccgcgatggtcaagccgttctccggcagcgcggcgcgggcgatgctgatcgagaccatgcagacccagggtgtggatagttttccggcgttggtggcggcgacgatacagggcagtacggaaaccactttctatgtgttggcggtgtactttggttcggtgggtatccagcgggctcgacatgccgtcggttgtgcgttgctggctgagtttgccggtgtagtggcggctatctccgtgtgctactggttttttggttaaggctacaatcgctatcgcagggtttcagtgctgtattgccctgactcactacccaatccaccacctgcttattcaactgatccccggcctggccaaaagcagccaccaccgtcggcaccttggcgtcattcaccggctgcctcacttcaaaccgacggctggcgataatcctttgatcacgcccacgcaccaatcgcgcgtcgagacgaatcaccacctccactgccgtgccccgatactcgctctgaaacgcctgcaactgcccgcccagctcatagtcggcttgcaggttggtctcgtcggtactcaacaatgtcacgcgcccgtcgcgctggaagccatccagcaggcgattacgcagcaacaccggcgccgggtcgctccagcgcgagttcgcgtaattgctgatcaggttcccgtcaggcaccacggcgatgcgcgggctgtcgagaaactcgctggtctgcggcttggtcacgcgcagcgaccaactcaccggcgtgccttggctggccggttgggcggacgccagccggtacacgtccgacgggtccggcttgggcaggatcgagcaggcgctgaccagtgccagggccatagggacgatcatgtggtaagcacgcttcatggcgtgaactccttgttcttatcgctgcccagcaggtaaccactggggttggcttccaggcggcgagagatggcgcgcagcgagccgagggtttcacgcagctcgcgcacggctggtgccagttcgttgaggccctgcatgccactgtttaccgagtcctggttattggtcagcaaggtattgatggtggcggtgctttgctccagggatttcatcgcctgctcggcgctgccgaaggcttgcttgccttgttcgctgagcaagccattggcgctgcgcatcagcacggtggtttgctccagcgccgcgcccgcctgtttgctcacctgcatcaattgctgcatcaccaccttgatgtcgccgcgttgctcggcaatggcgccggtagtttgttgcaggttgtccagggtgttgctcaggcgttcgacgttttcccgcgagaacaggtggttggcgttgtgcagcagcaggttgacgctggtcatcaggtcgttgctgttattgagcaggcgcgcgatgggcgatggcgatgcgatgatttccggcaggttgccgtccttgcccttgagttccgggctctgtggggtgccgccactgagctggatgatcgaggtgccggtgatgccggtcagggccagtttggcctgggtgtcttccttgatcggcgtttgcccggccaggcgaatgcgagccagaacgcggcgcgggtctttggggtccaggcgcaggctgatcacgtcgcccaccttgatgccgctgtactgcaccgcactgccctgggacaggccgctgaccgcctcgttgaagatcacttcgtaatcctggaaggcggtatcgacgctggacttggccagccacaggccaaacagcatcgcgccgaccaccacaattacgctgaacagtccgatcatcacatgatgggctcgggtttccatgtcatacctcgttgagcgattgagcggcatccaatgccgcgcggccccgggggccgtggaaatattcgtgaatccaggcgtcgttcgtttccgacacgacatcgatggcgtcggccaccagcactttcttctgcgccagcaccgccacacggtcggtgatggtgtacagcgtgtcgaggtcgtgggtgaccaaaaacacactcaagcccaacgcatcgcgcagggtgaggatcagttggtcgaattgcgccgcgccaatcgggtcgagaccggcggtgggttcgtccaggaacaggatgtccgggtccaaggccagtgcgcgggccagggctgcacgcttgatcatgccgccggataacgaggccgggtatttatcggccgccgacagcggcaaccctgccagggccagcttcaccgccgccaagtgctcggcatcggcgcggctgaggccggcgtgctcgatcaagggcagggccacgttttcggtcaccgtcagcgaggaaaacagagcgcccttctggaacagcacgccaaagcggcgctccaccagcgagcgttcatgttcgggcaggctcggcaggtttttgccgaacacccgtacttcgccttcgctggggcgacgcaggccaacgatgctgcgcaacaacacggatttaccgctgccagagccgcccaccaccgccaggatctcgcccttgtacaaatccaggtcgaggttctcgtgcacgctttggctgccaaaacggttgcacaggccacgcacttcaatcaccgcctcagtgggcgcacggtgtagacgactcaccagcccatctccatgaaaaacattgccgcgaccgcatccagcacgatcaccacaaagatcgattgcaccacgctcgacgtggtgtgcgcgccgactgactcggcactgccgctgactttaaaaccttccaggcagccaatggccgcgatcaaaaaggcaaagatcggtgccttcaccatgcccaccagaaagtgttgcacgccaatgtccgattgcagcagcgaaagaaacatcgccggcgaaatatccagggccaccgcacacaccacaccaccgccgacgatccccgagagcatcgccaggaacgtcagcatcggcaacgccaccagcagcgccagcacgcggggtaataccaacagctccatagggtccaggcccagggtgcggatggcgtcgatttcttcgttggctttcatggagccgatttgcgcggtgaatgcactggcggtacggccggcgatgaggattgcggtgagcaacacgccgaattcgcgcaggaaggagaaggccaccaggtccacggtaaagatcgtcgcgccgaagctcttgagcacggtggcgccaaggaaggccacgacggcgcccaccagaaaggtcaacagcgcaacgataggcgccgcatccaggccggtctgttcgatgtgggcgaccatgggcgtcaggcgccagcgtttgggccgccaaatgccgcgggcgaaggtttcgaggatcaggccgataaagcccaacagcttcattgcgtcttgccagaccgtgtctactgcgcgaccgatacgggccagcacttgaatgccggcggcctcttctggctctttgatcggtacgcaaaagtcattcagggagcggtagacggtcttgagcagtgcccggtcggcggctgccagggtgcaatcggtctgttcggcagagtgttcgatgcgcgcggggcccagcaactccaccagcagcgaggcgccggctgtatccagcgcaccgaggccgttgaggtcaatgcgggcgccggcgtcgtattggccgtcgagtgtggccgacagctttttcaggtgggcgtagtgggccagcgtccagtcgccggtaatccgtagcgaaggcggggtgctggacgtatcaagatgggccgcgccggccgtcgtgcgagtggtcataagctccgagcttgtttggctatccacaattgctacgtaatagcacgatccggtttactttgggttgtccgcttgtgctgtgtctatcaccttgaagcgcagaacgccgatgacttgcccgtcttcggtgagcacctgcacctgccagcgccccacggcgtcacccgggaagttctgcttgtgggtccaggcgcgatagccttccttgcgcccaccgtggatgtccagggcaatgcggtcgacttcctggccgttgaatttccacacatggtagatgcgctcatccagcccgcgtggcgcgttgatcgcggtgtaggcgtacagcccaccgctgcgcaattgggcggcggtgacttgcttgaggtcgtcgcccggcgtgcggtcttgcagttgggtgctgatggcgacttcggtcatccacagggtggcgggcggtacccagctgcgcaggaaccagccggcgcagccgatggcggccgttacccccagcagcatcgcccagcccttgaggctacgcagcggcaggctcacggccaggctgggaatcgacaagaccatggctacacccaacgccagtttgtaactctgggcggtggtcaggtgcatgatgatcggcagcgcggtcagcaacgcggcgaacagggtcagggtgtgcagggccaggaacagcgagcgcttgggcgccagccatttgtaatacagcgggtcgatgatcgacaccagcgccgccgcgcccagcaggccagtgaacagcgattggccgctgttccaagcggtggtgacgaaaaagaagggcagcacgaaaaacagactttcctggtgaatcatctgggtggcgtagcgcagcagcggttcagggatctcgcgattgaagaccttggtgaacagttgcgtaaagctgttctccagcatcagccacaaccagctcaccagcatgatcaccgcgatccaactggccatgccctgctggcggtctaccagaatgaagctgccgacccccgagatgaaaccgccgagtgcaatcacccctgggtagcgcttgatcagttctataacgcgctggatgaggggcggcaagttcggcatgggcggttcactggttgtgggaaaaatctcagacagaataacgccttagcccgatattctgtgcgtcattactcaacaggtttgcgataaagcctcaagccgatcaaaccaaggatgatcaggcccagcacgcccgcaccgatccaggtcaacgcgtcataactcaacagcggtttttcgatgcgccagtagcccggctgctggaacgcttcgcgcatggcctggttggtttgcgccaggcttacagccttgatgcgtttgaccggatcgctgaaacgcccgttgctgtagtcgccggccgcactccaataatagtcggccagcgcgctgttgccctgcaccgcccaagcctgccgggcaatggcggcttgctgcaggcgtgtgaatactgttgggtcgaggccgtccttgagcagttgggccttgaggtcttgcaagacctgctcggcttcagggaggttttctcgctcaaggtcggcattcaagctgaggaatccaacgccgccgagcacttcgcgttctacccaggggccgtaggacaaaccgtgcttgaggcgcagttgccggtacagtgcccagtcgaggtaatccttgagcaggttgtaggtttcatcatgctggtcatccaacaccggctcggggaacagccagtgcagcttggcgccatcgcccacccagccgcggatcaggtcgcggtggctggcggcggtgtgctggatttccggaagcgggcgatgttcgctcggctccacggggtcgagttgaccataggtgcgttccaggtaggcaggcagcagtttgtcgagatcgccgacgacgatcagggtcatgttgttcggcgcgtaccattcgttgcgcagcttctccaactgatcgcgggtgaggtggctgacctcggcgcgttcggcgcacttgaggcccaactccacggccaattggttgctggcgctgtgaccgaggtcctggcggtccagcaggcgttgcaagtgtgagtaatggccgccgtcttcgcgctccaccacctgtttggcggcgttgatatgggcgtcggtcaggcgcgtgcgcgtgaggattgccagcagcaggtccagcaccttgcgttggttctgcgcgggcgcctcgatcacgaaggtggtatcggcgttgctggtgtaggcgttccactcgccgcccagggcttgcatgcggtcttcgaggtcgccctcgccgccgccgtcgatgccgctgaacagcaagtgctcgaacaagtgcggcagttctttttcttcgcaaccgaagtcgtccaggcccacaccaaccaccaggcgaatagcgacatgcccacgctcggtgcccggtttgagcagcagttgcaggccgttgggcaaggtgtagccctcgacttgcagacggtcaaaggcaaaggcgtgtgccgagcccaagagcaggcaggcgagtaacaggcgacgcataacaagcttcctggcgaatgaggtccattgttaactgacttcgctcgcgggcgtacgttcagggcgaatgggtaatgtcggcaatactttcagccgagagcgcgccagtgtcggacgtttccaacactacataagcactgctgcaaaacaatgagttcaagcgtttcatgtcggcaatcagttccaagtgcagggaactggtttccaggctctgcacgatcttgcgctgcaggcggctgacatgggcgtgggccaggcggcgttcctgggcgcggaagcggcgcttttctcgcagtaattggcgggcgctttccgggtcgccgctgagaaacaccgacaggcccaggcgcaggttggcgatcaactggctgtgcaggccgctgagttcctccaggcccacttcggaaaattgccggcgctgcgaggtcttctgttgctggaccttgcgcagcatgcgttcgatcaggtcaccggccaatttcaagttgatcgacagctcgatgatctcggcccagcggcgattgtcttgctcactgaggtcttcacggggcatttgcgccaggtagagtttgatcgcgctgtagagcgcttcgacgtcatcgctcaggctgcgcatttcttgggtaacggcggtttgattgccgcgcagcacttcctgcatcgaggtaagcatattgtcgatcaagtcgcccaggcgcagggtttcgcgggcggcgttcgccagggccaggcttggggtattcaatgaggccaggtccagatggcgtggcttggctttgccattggtttcggggcgttccggcagcagccattcgcacaggcgtgccatcggcccgatggtgggcaacaggatcaggcaacggctgacgttgtagagcaggtggaaggtgatgaccatgccctgaacgctgtagtccaggccgtccatccagcctacgagcgggtcgagcaccggaatgatcagcaacagaccgatcaatttgtacaacaggctgcccagggccacttggcgaccggcagtgttttgcatgctggtgctgagaaaagccagtacgccgctgccgatgttggcgccgatcaccaggccgatggccacgtgcaagccgatcacgccggcaccggccagggtggccgtgagcaacacggcggcaaggctggagtaggaaatcatcgcgaacagcgcgccgaccagggcgtccagcaagatatcgccggtcagcgaagcgaagatgactttgacgccctgggcatgggtaatgggcccggcggcttcgacgatcaattgcagcgcgaggatgatcaggcccaggccgatcccgacccggcccaactgccctgcccgcgtctgtttgcgcgacaggaagaaaatcactccgaggaagatcagcagcggcgacagccaggacaaatcgaacgtcagcacccgcgccatcaaagccgtaccgacgtcggcgccaagcatggtggccagggccggcgtgaggctcatcagcccttggccgacgaacgaagtcaccagcatcgcggtggcgttactgctttgcaccatggccgtcaccaggataccggcgacaaatgccagccagcgcttggacatgttctgcccgatgacttggcgcaagttggaaccgtagacccgcaggatgccggttcggacgatatgcgtgccccagataagcagggtcacggcggaaagcagattgagcaaggtcagcatgctcggccccccgtgtgggtgcgctccaaaaggagcgaaggaaagttaccgcgtgccgctctacgtcttgtacctaagctgtagttggcgaatgggctctgcgccagcatcgcatagctaaactttggattgaaacaaaactgtcatgaagatcgttccccacgctcggcgtgggaacgcatcctgtgacgctctgcgtcactttgcggacgcggagcgtccgagagggcattcccacgcggagcgtgggaacgatcactcgcgggtcaaatttactgacccggaatgtccttgcgcagtttcactgggtcctgctgtttcttctttttcgcgatggcggtacgcatcttgatgttcaccgcttccaccgccagcgagaacgccatggcgaagtagacgtagccttttggcacgtgcacgtcgaaggattctgcgatcagcacggtacccacgaccagcaggaacgacagcgcgagcattttcagcgacgggtgcttgtcgatgaattcgctgatagtgccggcagccagcatcatcaccaataccgcaacgacgatggcggcaaccatcaccggcacgtgggaaaccatgccgacggcggtaatcaccgagtccagggagaacacgatgtcgatgatggcgatctggataatggtgtagatgaatttgccaccggcgcctttgggctcgtcctgggtttcatcttcaccttccagggcgtggtacatctcctgggagcttttccacagcaggaacaggccaccgaagaacaggatcaggtcgcgaccggagatgccctggccaaacaccacgaacaggtcggcggtcagttgcatgacccaggtgatcgacagcagcaacaggatgcgcgtgaccatggccaacgccaggccgaagatccgagtgcgcgcctgcatatgcttgggcatgcggctgaccaggatcgaaatcatgatgatgttatcgatgcccaggacgatctcaagggccgtcagggtgaagaaggcaatccagatttccggattggtcagccattccatgtgtattcctttgagcaagtgttaaccgcgcaagctgtagcgccgcgcggtgagtgagtcggtacgattatagagtgctgaacagcggaaaaatccccatcagcaatgcggcgaacattatgcacaggcacaccagcactgcccacttgagcgtgaagcgctggtgatcgccgaattcgatacccgccagggcaaccagcaagtacgtcgagggtaccagtgggctgagcaaatgcacgggttgcccgacgatcgacgcccgcgccatttccaccggggtgatgccgtaatggctggcggcttcggccagtaccggcagtacgccgtagtagaacgcatcgttggacatgaagaaggtgaacggcatgctcaccagcgcggtgatcaccgccaggtaagggcccatggcttcggggatgactgccagcaggctcttggacatggcgtcgaccatgccggtgcccgacaggatgcccgtgaagataccggcggcgaagatcaaacccaccaccgccaacacgctaccggcgtgagccgcgacgcggtctttctgctgctgcaggcacgggtagttgacgatcatggcgatactgaacgccaccatgaacagcaccggcagcggcaacaggccggcaatcaaggtgcacatcaacgccagggtcagggcgccgttgaaccagatcagttttgggcggcgagcgtcggggaattgcgacacgctgatttcgctgtggtcgatctcgtcgccctgcaggtgcaattcacccaggcgcgcacgttcgcgcttgccgtacatgtaggcaatcaccaggatcgccacgacaccggcggccatggccgggatcatcggtacgaagatgtccgacgggtctacatgcagcgcactggcggcgcgcgccgtcgggccgccccagggggtcatgttcatcacgccaccggcgagaatgatcaggccggccatgatccgtgggctcatgccgatgcgctggtacagcggcagcatggccgcgacgcagatcatgtaggtggtggcaccgtcaccgtccagggataccaccaacgcgagcacggcagtgccgaccgacaccttgagggggtcgcccttgaccatcttgaggatcttgcgcacggccgggtcgaacaggccggagtcgatcatcaaagcaaaatagaggatggcgaacatcaacatcacgccggtcggcgcaagcttggtgatgccttcgagcatcatcgggccgatcttcggtgcgaaaccgccgaacagcgcgaacaggatcggcacgatgatcaaggcgatcagcgcggacaggcgcttggtcatgatcaggaacatgaacgtgatgaccatggcaaagccaaggaaagtcagcataggaatactccaggcgtagcgcggctagggaatggcggaccgagtggcggtcagcgcagaacgaaaggcacgaggcgtacgggtggagttggagcgaacaggcgggtacgagcggacatcgggaatcaccattgttgttgttaacagccggtctgttgccggcagtggaggcgatcctagacggggaagctttcagccagctttcgctgggaaaacagctgatgaagggcaggcaccaatcttcaggttggcgcagaacaaaatgtgggagctggcttgcctgcgatggcggtgtatcagccaatatctcttatggctgtgacgccgtcatcgcaggcaagccagctcccacatttggaaggtggttgctaataaaattcagggcagttcgaggccgccggcggctttatgcagcgcccgcaaatgctcacccacttgtttgaggttggcctcacaggcggcaatctcggcggcgcgagacggatcgagcagcgccctcacctccttatccagctcgccggtcaacgactgcaactgcttctggcgttcggcgctttctgattccaggcgcttggcttccgaaggttgcggcaggccataacccccactgtccagcaactcggccgggcggctcagaaagccactgttggcgagaatttgctgcagcgtgttgttggctttctccatgccgccgtatttcagctcgcgggcattgagatagcgttgtttgacctcatcctgggcgagcatcagttgtttgcgatagctggcctgctccagcagcaacagtgcggcgctggtacgcaggtcggcctgggcaaaccattggcgacgcgcttgcgcgtccagggacaaccagtcttcgacttgggtctgcttgataggcagttgcttgcgtagcacatcgaacatggcctggtagcgctcgcggaacgagtcgaagtgataccccaggcgcagggcttcgcgcttgtcgttcaatacactggtatcggccaggccgcgggcgctgagcacttccagcaagccgttgggggtgatgttgtccaggccggtcaattgcgggttggcactgccactgcgcaacagtttcaggctttcgaccgcacagttgttggaaatgaagaagtagttgccgtcgtagctccagtgcatctcggcggcatgttcgacggtgtcgttgatttcctggcggctgagcttcagtggcaccgacgccaggccacgcagttcggtcttggtgtactcatcaatgacctgggccagcggcagcacgaacagccgtgacgggtatttgcccaccaggccatcccagctcgacagctgaacgtcaccgacgaaggcgcgataagacaagaccaggtgccggtccagatctagccggcaatccgggccacgcgggcggcccggggcgcaaatcaccaggcgcaacatgctgtggccccaacggctcaccaggttctggttggcttcggccagcaaatagtcgatttcatacacgcgttccggatcgatctggcccaggggcgtcttggcgaaatcgttgcctgcgttcaggaaggcataggtgctggcgcaggtgtcctgttcgggtggagcccagccgaagtgatccttgtaataacggaacagcgcggggcggcgacaggcgtagctggggtccaggaggaagtactccatgttgaccgccacgaactccagcgggctggtggtttcgtagatgtccgggctgcgtaccacctgatggttgtgctgctcacgctcgccgcgccgacccacatattgtggccagccggcaaggtccagcaggcgcgggtcgtcactgagggtaaagcggcggtcgttctggccacggcactggtcgggcaagccgatcaagccggtgatgttgttctgacggctgcagcgttggatcagcgtgcgctcgtccttggaccacaggcgcgcacggtcatagatgtgggtcagttcatgcagcacggtggcgagcatttcccggcgcacagtaccgtgggggcgattggttttctgggtggcggcactgccgtcagtcaggctggcgagcaggttctggttgaggtccagttctgacaccagggatgcctggccgtaagcgttttcaggcatcttgtcggtccagccgacatcaatacgtcgatccaactgctcgacaaagcgcggcggtaaggagcgcagcgcttcatcgagcagtgcctggctggcctgctgttcggccgggctcaagccttcggtcttgagccgcagttgcaggccggcctgggccgtacttgcgcacagcagcacggccccggccaggagccaggttttgaagcgcctcacagagcgaggatagcttctgcgagggtctggtcgctggcatcacgggcttctggcacgcgggtgcgaagggtatcgaacgcggcttccagctgggcgccacggatctcgccattggtggcgacaaaactggcggcgtcatcgtgggcttcgcgcacgatcttggagtcgcggatggaggtggtggtgtccgaggtgaaatcaatggtgcgtgccgaggcacgcacgacgatgttgctggtggccttcaaggtttgcgcctgggcgacatcggccaaaaacagcaggccgagggcggcgacgatcagcgggctacgcatgggatgactccaatgacaaagatagaaatacaacgatgattattggacgagaattgcctgcgccagttcaaggtcgcttgcatgaagttttggctgggtacggcgtagatagtccagcgcggactccaggcgtgcgccccgccattggccgtcagtggcaatgaaagcggcagcatcatcccgagcggccaggaccaacttattgtcgaacggcgcagaggtcactttgctggtggcatacacgctgacaaccgtgctctgggtggacacatccaacgctgaagccatgggtgaccagcaggcgcaaaacagtacaggaacaatcaataaacggtatgaaaaagccatgggactcgacaatggaaagcgagcgccaaggctagcgcaaccgccgggcgagagccagcgtcgagccattcgggagcggcgggcgctcccgtctggttgccgtgggtcagatagccaggatggcctgagccagctgtgcatcggtagcggtattcaattgcggcgcttgttggcggatctgggccagggcgctttccagtttcacgccacggatggcgccttcgctggcgacaaagctggcggcgtcgtcacgggccgcttgtacgaccttgttgtcgcgcagggatgaggtggcgtcagacgtagcatcggaggttgccttcagagcgccgacgatcgagtcggtcgtcatgatcaggctgctcgcgttggcattggcagccagggtcagcacagcggcagtgcacagcaggcgaagacgggacatggggtaactcctgtagacgaataataaggtggcgcgaaacggccacaatgaaacggactgggactgtcgagcatcagacgcacgctctacagggttcgccacgtggtgaaccgatattaggcgtgtgcccagctattcggaagcctgtaattaaactgtacctgtcatattttattaatttaaaactgtatctgtgtgcttgaatcgagccaatccaatgcgctatcgcagatacaacaaagcccgcctccggttacccggggcgggctttgctttgacaaatcagggtgctggcagtggacccgtcaggtcagggccagcgggcgccacttagcgccagaacggcttgctcagctcttcgtagcgttgagcttcgctgataccggcgtcagccagcagacgcgaatccaggcgagccagttggtggcggctggagatgcggcgctgccacaacatcaggttggcgagaacgcgcaaaggcagggaagcctgggtgtttacagctttttcttcgatgaacagttcggaactgagtgtacgttccatgatgacatccttccgcttgtggcgggattaggtagtggtttaactgatgccaatgatcctcctccagcgcaagactctctagatacagttcacctgtattgtgagaggccagttaactgtttaagagggctgtacggtacgaaattggggcaactgtacctgtgcgcacttaaaaggtgcgaaataggcgtttttaagctgaggcgtgggatatttcggtaggaaatgaccagtacagcagtacagttttttccagaagtacgagtgggttcaccgagctgatgaaactgtatttgcatcagcccggatctgtattcatcaagccacgagcatgtgcccggtttcttccaggttaatgtgccaactcagtgcttcgcgcaagatgtgcggggtatgcccaccgatggcgcaggcggcatcgaagtaagtgttcagggcatcgcggtaggctgggtgcacgcagttatcgatgatgacccgagcgcgctcccgtggcgccaggccccgcaggtcggcaaggcctacttcggtgacgagaatgtccacgtcatgctcggtgtgatccacatggctgaccatcggtaccacgctggaaattgcgccgcccttggcaatggacttggtgacgaagatcgccaggtgcgcattgcgggcgaaatccccggagccgccgatgccgttcatcatccgcgtgccgcagacgtgggtggagttgacgttgccgtagatatcgaactccagcgcggtattgataccgatgatgcccaggcgccgtaccacttcagggtggttggaaatttcctgcgggcgcagcaccaatttgtccttgtagtgctccaggttgccgaacacatcggcattacgccgctccgacaaggtaatcgaactgccggaggcaaagctcagcttgccggcgtcgatcaggtcgaaggtcgaatcctgcaacacttccgagtacatggtcaggtcttcgaacggcgactcgatcagcccgcacatcaccgcgttggcaatattaccgatgccggcttgcagcgggccgagcttgttggtcatgcgcccggcatcgacttcttgcttgaggaagttgatcaggtggttggcgatgccttgggtgtcgctatcaggcggcgttaccgtggaggcggagtccgcctggttggtgatgacgatggcgacgattttctcgggtgggatcggaatcgcagtgctgccaatgcggtcgtcgactttcaccagcgggatcggcgtgcgcgtcggccggtaggtcgggatgtagatgtcgtgcagcccttccaggttcgggttgtgcgccaggttgatctcgacgatcacctgtttggcaaaaatcgcgaagctggccgagttgcctacggaggtggtgggcacgatatgcccctgctcagtgatcgcgacggcttcgatcacggcgatgtcgggcaatttgagctgattgttgcgcagttgctcgacggtttccgacaggtgctggtcgataaacatcacctcgccggcattgatcgccttgcgcagggtgctgtcgacttgaaagggcatgcgtcgtgacagtacgccggcttcggtcaactgcttgtccaggtcattgcccaggctcgcgccggtcatcagcgtgattttgagcggcgaagtcttggcgcgttcggccagggcgtgggggacggccttggcttcaccggcacgggtgaagccgctcatgccgacggtcatgccgtcctcgatcagtgcagcggcgtctgccgcgctcatgaccttgttcaacaacgaaggcaagcggatacgatcacggtacatgaattgttatctctggctacggaaagcaaggtgggcagtgtagtgatttcaaaaagtttcggcccgctaccatggtcgaatgccaggtcgcgatttagagcctttggtcgggtttcatgtgtgtgcaaagcgggacgcagagcatcccgggacgcgttcccacgcagagcttgggaaccataaaaaaaccccagcctacagcaggccagggtttcgggtattgcgctggcgcagtgttattcgacggctttgaccatgtcttcgatgacctttttggcatcaccgaagaccatcatggtcttgtccaggtagaacaactcgttatccaggccggcgtagccgctggccatcgagcgcttgttgacgatgatggtcttggccttgaacgcctcgagaatcggcataccggcgatgggggagttcgggtcgttcttggcagccgggttgaccacgtcgttcgcgcccagcaccagcaccacgtcggcctggccgaactcggagttgatgtcttccatctcgaacacctggtcgtagggcacttcggcctcggccagcaatacgttcatgtgccccggcatacggcccgccaccgggtggatcgcgtacttcacggtgacgccgcggtgggtcagcttctcggtcagctccttgagcgcgtgttgtgcccgcgcgaccgcaaggccgtagcctgggacgataatcacggtatcggcattggtcagcaggaaggtggcgtcatccgcggagccggacttcaccgggcgtgcttctttggagcccgccgcggcgccagcatccggcgcattgccgaaaccgcccaacagcacattaaagaaggagcggttcatcgccttgcacatgatgtacgacaggatcgcgccgctggagcccaccagggaaccagcgatgatcagcatcgagttgttcagcgagaaaccgatgcccgccgctgcccagccggaatagctgttgagcatcgacaccaccacgggcatgtcggcgccgccaatcgggatgatgatcagcacacccagtacaaaggccaaggccagcatcagcgcgaacgcagtgaggttgccggtgaacatgaacgccaggcccaggcccagggttgcgaggccgagcaccaggttcagtttgtgttgcccgccgaactgtaccggtgcgccctggaacaggcggaacttgtacttgcccgacagcttgccgaacgcgatcaccgagccggagaaggtgatagcaccgatggcagcaccgaggaacagttccaggcggttaccggccgggatcgaatcgcccaactgcttgacgatgcccagggactgcggttcgaccacggcggcaatggcgatgaacaccgctgccaggccgatcatgctgtgcatgaaggcgaccagctctggcatcttggtcatttcgacgcgcttggccatgatcgagccggcggtgccgccgaccagtaggccaacgatgacgtagccgataccggcagtcgccagttcagcccccagcttatagatgaggccgacggtggtgagcaccgccagcgccatgccgagcatgccgaacaggttgccgcgccgcgaagtggtcgggtgcgagaggcctttgagggcctggatgaaacagatcgacgcgatcaggtagagcgtcgtcacgagattcatgctcattacttgggcgcctcttcttttactttcggggctttcttcttgaacatctcaagcatcctgcgggtgaccaagaagccaccgaagacattcaccgccgccagggccacggccagtgtgcccatagtcttacccaacggcgtgacggtcagcgcggcagccagcatggcgccgacgataacaatcgcggaaatggcgttggtcacggccatcagcggcgtgtgcaatgcgggtgttacgttccagaccacgtgataaccgacataaatcgccagcacaaagatgatcaggttgtagataccgggggagataagctcttccatcgtctgagtccctgcttaggcgtttttgcggatgacttggccgtcgcggcacatcaggcacgcggcgacgatgtcgtcttcgaggttgatttcaaactgcccttccttggtgaagaccagcttcaggaagtccagcaggttgcgcgcatacaaggcagaggcgtcggcggcgaccgcacctgccaggttggtcgggccgcagatgatcacgccgttttccaccacgacctggtcggccacagtcagcgggcagttgccaccctgggctgcagcgaggtcgatgaccaccgagccgggtttcatctgcgccacggtatcggcgctcagcagggtcggagccttgcggcccggaatcagggcggtggtgatgacgatgtcggcctgtttggcgcgttcgtgcacggccagggcctggcgctgcatccaactgctgggcatcgggcgcgcgtagccgccgacaccaacggcgcattcacgctcttcatcggtttcgtacggtacgtcgacaaacttggcgcccagggattcgatctgctcctttaccgccgggcgtacgtcggacgcttcgatcaccgcgcccaggcgcttggccgtggcgatggcttgcaggcctgccacaccggcgccgaggatcagtacgcgcgcggcttttacagtgccagcggcagtcatcagcatcggcatgaagcgcgggtagtgatgagcggccagtaacacggccttgtaaccggcgatgttggcctgcgaagacagcacatcaaggctttgggcgcgtgaagtgcgcggcgcggcttccagggcgaaagcggtgatgccgcgctcggcgagcttggcgatggtttcgttgctgaacgggttgagcatgcccaccaacacggtgccacttttgatcagcgccagttcgctgtcgctgggggcaaccactttaaggatcagctcggcgccaaacgcgtcgttggcactgccaatggtggcgcctgccgtttcataggcactgtcgacgatgctggcattgatgcctgcgccgctttgtacagtgaccttatggccctggccgatcagcttcttgatggtttccggggtggcagccacccgcgtttcaccggtctgggtttcgagaggaacaccaatgtgcacgtcaaatctcctgcatgatctttttgcttttgatctttttgtaaaaaggccagtgcaccgcgagtggcgcaactggggcggccgatcagcacgatcccgctgaaatgacagcggggcgcggcattttgcaggcgaactttacggccatcaagggattatgacgggtgacgaaaaattaactacaagtcaccctgtgactgattgtcgcaacaagctgaaataacctctttaaatacaggcctttaaaggtgttcaggcgttttcggtccgtttttccattgccagtgtgaatagtcgtgcattggccggtaagagtcgctaagagccatgagatacatggcttttagccttatttttggctgacaagtacagtctgtttaaatgcgacatatacgtacatctgtaggttctgaatttatttgactacaaagtcagcacttgcgttgtgtccttcatttacatgggttgtagcgtcttgactggtcgagcagccagtccctgaatgcatgcagagaagcggattcgacctttttgtcaggaatcatcaggtaataagccttttcgctggtcagtgcttcggtgctggcgattgccagttgttgctccttcagctcccgctgtatgaggaagggaggaatcagtgcgatgcccatgtcatgcatggccgcttgagacagcatcgagaatagctcgtatcgagggcctgtcatgtcgcgagggatgttcagttgttgggcgttgaaccattggcgccaggcgtagggacgtgtggtctgctgcagcaggggcagctcggcgatctgttgaggggtgaaatgcgtgcggtcgccgagtaagcgcgggctgcataccggtaccgggttttcgcccattaaccggtgggattgcgtacccgaccaatcggcatccccgaagtagatcgccgcatcgaactcggtatcagcgaacaggaaggggcgcgtgcggtttgtcaggttcaccgtgacttccgggtgctggtgttgaaagtctttcaggcgtgggatcagccactgcgtgccgaaggtgggcaccaccgccagttcgatgacattggcgccttgctggcccatcaccgacaaggtgtcgcgctctacggcgtccagttgcgttgcaaccctgcggctataagacagccccgcctccgtcagcttcactccacggcgtgagcggcgaaacagctcgacactcaaaaactcctccaggctggcgatctgtcggcaaatcgcgccttgggtgatggaaagctccagtgctgccttggtaaagctctcgtgccgggctgctgcctcaaagctgatgagtgcggtggtactggggattttccggcgcatgtacgttgccctcacagataaagcgcatttctgcgcttttttagtgttacgaagtgagaaattagcacaagcctatgcaaaaacctcgtttgccctctgcgctgaccgcgcctagtctggttccacgacttctgattttttccgcgaggacttattcatggctggcaaggcaagcttcaactggatcgatccactgctgctggatcaacagctcaccgaagaagagcgcatggtgcgtgacagcgccgagcaatttgctcaggacaagctggctcctcgtgtgctcgaagccttccgtcatgaaaagacagaccccgctattttccgtgagatgggcgagaccggtttgctgggggcgatgatccctgagcagtacggtggcagtggtttgaactacgtcagctacggtttgattgcgcgtgaggtcgagcgtgtcgactccggctatcgctcgatgatgagtgtgcagtcttccctggtcatggtgccgatcaatgagtttggtaccgaggcgcaaaaacagaagtacttgcccaaactggcctctggtgaatggatcggttgcttcgggctgaccgagcccaaccatggttccgacccgggtgcgatgattactcgtgcacgcaaagtggatggcggctacagcctgaccggcgcgaagatgtggattaccaacagtccgattgcggatgtgtttgttgtgtggggcaaagacgatgcaggtgatatccgtggcttcgtcctggaaaaaggctggaaaggcctgagcgctcccgctatccacggcaaggtgggtctgcgggcctcgattaccggtgaaatcgtcatggataacgtatttgtgccggaagaaaatatcttcccggatgtgcgtggcttgaaagggccttttacctgcctcaactcggcacggtacgggatttcctggggggcgctgggggctgctgagttctgctggcataccgcgcggcagtacacacttgatcgccagcagtttggtcgcccactagctgccactcaactgatccagaagaagctggcagacatgcagaccgagattaccttggccctgcaaggttgcctgcgcctgggtcggatgaaggatgagggtacggcggcggttgagatcacatcgatcatgaagcgtaactcgtgtggcaagtcattggatatcgcgcgcatggcccgggacatgctgggcggcaacggtatctccgacgaattcggagtggcgcgccacttggtcaacctggaagtggtcaacacctatgaagggacccatgacgtgcatgccttgattctggggcgcgcgcaaaccggtcttcaagcgttctattaataggagcatgggcatgggcgcgctttcgcatctgcgagtgctggatttgtcgcgagtactcgcgggcccttggtccgggcagattcttgcagaccttggggccgaggtgatcaaggtcgaaaggccgggcagcggcgatgacacgcgcgcttgggggccgcccttccttaagggtgcggatggcgagaataccagtgaggcggcgtattacctgtcggccaaccgtaataaagagtcggtgaccatcgactttacgcggccggaaggccagaaactggtacgcgatctggctgccaagtccgacatactgatcgaaaacttcaaggtgggcggccttgcggcgtatgggctggactatgaatccctcaaagaggtcaacccggagctgatttactgttccatcacggggtttggtcagacgggcccttatgcgatgcgcgccggctacgatttcatgatccagggtctgggtgggctcatgagcctgacggggcggcctgaaggggatgaaggtgccgggccggtaaaggttggggtagccttgactgatatcttgaccgggctttattcgaccgtggcgatcctggctgcgctagctcatcgcgatcacgatggtggtgggcaacatatcgacatggcgttgctggatgtgcaggtggcttgcctggcgaatcaggcaatgaattacctgacaactgggatgccgcccaagcgcttgggaaatgctcaccctaatattgtgccctatcaggatttccccactgccgatggagatttcatcctcaccgtaggcaatgacgggcagttccgtaagttcgctgaagtcgccgggcagccacaatgggcggatgacgtgcgtttcgccactaatcgcgcgcgggtggctaatcgcacggagctgattcctttgatccgtcaagcgacggtcttcaagacgaccgctgagtgggtgtcgcagctggagcaagtgggcgtgccatgtgggccgatcaatgatctggcgcaggtgttttccgatccgcaggtccaggcgcgtggtttggggattgagctgcctcacgcattggcggggacggtgccccaggttgcgagcccgatacgcttatccaagacgcctgttgagtaccggagtgcgcctcctctattgggggagcatacgcttgaggtgctgcagggggttctggggctgggagctgctcatgtggccgcattgaaggaggcgggtgttatttgagcgttcccttctatatagaagcgcactggtgagctggttgttttttaaccgaagctaacttattgataggaaagcaaaattaagagttgacggcgaattatatctgtctataattcgccccacttccggcgcagtcgaaannnnnnnnnnnnnnnnnnnnnnnnnnnnnnnnnnnnnnnnccgttggctgtgagggtaacggtggtggtgtcgaccgaatcggtaatggtggtgactgccggcgtagtgctcggtaccaggttttcaaagttgccgccggttgcaccggtgatggtggtgctgacggtcgaaccgttgttatagacgtcgttggccggagtatcgaccacaacggtgccggtcgactcgccagccttgatggtgatcaccgagccattgctcaaggtgacattcaccggggtctgcgccgggttggtcagggtggcggtgtaagtgatctgcccgccttcggtcacgctgccgtcggctgtcagggtaacggtggtggtgtcgaccgaatcggtaatggtggtgactgccggcgtagtgctcggtaccaggttttcaaagttgccgccggttgcaccggtaatggtggtgctgacggtcgaaccgttgttatagacgtcgttagccggagtatcgaccacaacggtacctgtcgactcgccagccttgatggtgatcaccgagccattgctcaaggtgacgttcaccggggtttgtgccgggttggtcagcgtggcggtgtaggtgatctggccaccttcggttacggtcgagccagcggtcagagtgaccgtggtggtgtcgatggtatcggtgatctgcgtcacggccgggttagggtcgatggtcaataccaggttgccgccgccggtggtaccggtaacgccgacgctgatctggcccgggtcgatgtacgggctgtcattaggggccagaggtacattcacggtgccggtcaactggcccgacgggatggtaatcaccgcgccattggtcaaagtgacggtcagatcgctggtggaaggccgggtcacggtggcggtgtaggtcagcacgccgcccgcttcggtgatggttggcgtcgcgctcagggtcaaggtcgaaggctgcagcacttggttgcccgagtccgccgagcctggtgctccgctcagggcgttgagtgctgaagtgccttggccgataggggcggtggggaagccgatggtcgggtctacacggccggcggtcgcatccagcaccacgaagctatggccgcccccggcggcaccgttaccggcagcgtttgcgccagctgcggtggcttccaggtcggtggtcgggtcagcgccggcggcgatggcttgttgcaactcggccaccgatggcgcggcttgctcgctggccgccgccaggtcggtggtggagtccggcatatcggcgctccactgggtgtcacggcccaggtccaggatgcgaccgtcggccagctccaggctcacggcgcccgacataccggtgtcgatctggtcgcccgcgaacaagcgatcaccttcaatgaggacgcgacgagtaccttccggagaaattacgaaaacttgaccaacaatgcttttgacggtggcaacaacactgctcattaaaattttctccggcgatccgtttcgacaaatccatttcgcagcgcgctattagcgctgccaatctgggggcgtagtctataaatgcattgacgtcaaatatttggctggattttttagctatctagtttgtgccaaactattgaccttatggtcgccatcctaaacaatcgccctagtaatgtcacattgatatttatgcggcgaaccgtcctacatgtgtgaagcagttccgcttttcgaactttccgacgtacggtcattacggtagccattatccgacgcagcggtgccaatcgctgtgatttaagacaagaagtcttggggaaattttaaatgcgtctgcacctgttcaaggcaataccgttcgctctcgccgccagtttcgtacaagcccagacactgccccaagccatgcaacaggcattggacgtacacccggaaattcaggcgggtgttaacagccgcatcgccgccgattaccaattgcgcgccgcacaaggtggctacctgccgcgtgtcgacttgaacgccggttacggccgccaaggaaccgacaatgccaccagccgtgccaataaccctggcggcaatcactgggagacgctcaaccgcggcgaatccagcctgcgcctgcagcaaatgatttttgacggttttgctacctccagcgaagtcgggcgtcaacaagccaacgttaattcccgcgcttactccttgctggggacttccgagcgcactgcgctgaccgttgcccaggtttacctggaagtattgacccgtcgtgagttcgtgcgcctggccgaagacaacctgcgcaaccacgagcgcatctacgatcagatcaagttgcgcacccagcgtggcgtcggcaacggtgccgaccaggaccaggccgaagcgcgcctggctcaggcccgcaacaacttgatcaccgagcagacaaacctggccgacgcgcaggtcaactacctcagcgccgtcggccagatgcccgacgaactcgagcgtccggccccgttcatggccatgctgccagccgacctgaacgaagcgcgccgtcagatgctcgacaacagcccggtgctgcgttcggccgagtcggatatctctgccgccgagaaacagtacgacgctgccaaatccacattctatccgcgctttgacgctgaactgggcaccaacgccgacaacaacgtctcaggtgatcccaaccacagcaatggctgggaagccatggtgcgcatgcgcttcaacctgttcgccggtggcagcaacaaggccgacctgcaatcgaagtcctaccaggccaaccaggcgctcgacatccgcaacaacgccttgcgccaactcaatgaagagctaggcttggcttggaacgccctgaacaacgccaacgcgcaattgccggtcgcccagcagtacgtggatcacagcacccgcgtacgcacgtcctaccagcaacagttcagccttggtcaacgtactctgttggatttgctcgacagcgagaatgaattgttcactgcttcccgccgcctggaagaaatcaagaacattcagttatttactcagtaccgaatcaaggcgaccatgggcgaattgctcaagagccagggagtggttgcaccaatggcctccgtcgtgcagaacgacgtgaaacctaaagtccaactgcctgggatgaattgagccaccccaatagccccatctgttagtcgagagtgcgccgcgtggaacctgaagtcagtcgagttcatctcagtcatgatccacgcgcactgcacgatgacccgttactcgacgggttgttggcgctctgcgccctgcatcagaaaccggccagtgcggccatgctcaccaccggcctgccgctgccttcgcaacggttgagtgccgagttgctgtcgcgtgccgctgcgcgggccgggctgcaaggccggctgctgcaacgcaagctggatcagatccctaccattgcattgccggcgctgctgttgctcaaggacggtcgcagtaccgtgctgctcggctggcagggcgaagatcaagcgcggatcctgctcagtgaaagcgacggcggtgaagtgctgatcaagcgcgaagcattggccgacgactacatcggcaaagtcttctttgcacagccgcaacacaaattcgacgtcaaccacggcagcctgattccacgggcgcgctcgtggttccgtgacaccctcatgcgttcgcgctggctctacaccgacgccatcgccgccagctttctgatcaacatcatcgccatggccgcgccgctgttcgtgatgaacgtgtacgaccgcgtcgtgccgaaccaggccaccgctaccctgtgggtgctggccgtgggcatctgcggtgcctacctgttcgacctgatcctcaaaagcctgcgcagcctttgcctggacctggccggtaaaaaaaccgacctgatcatctcggccacgttgttcgagcgcatcgtcggcatgtccatgaagtaccgcccggcgcgggtcggcagctttgcgcagaacatccacgagtttcaaagcctgcgcgacttcctcgcgtctttgaccctcaccagcctgatcgacctgccgtttacgctgctgatcttcctggtcatcgccatcctcggcgggcacctggtgtggattccggtgctggcattccctctggccctaggcatcggctacgccttgcaaaagcccctggtcgcgaccatggagcgcaccatggcgctggccgccgagcgccagtcgagcctgatcgaaaccctcgccgggctcgatgcggtcaaggtcaacaacgccgagagcgagcgtcagtacggctgggaacagaccatcggcaccctgagccggcttgagctgcgggtgaagttgctgtcgggcctgtcaatgaacatgaccctgctgatccagcaactggctggcgtaatcatgatcgtgttcggcgtgtaccagatcatcgacggcaacctcagtatgggcggcctgattgcctgctacatgctcagtggccgtgccttgagcccgctggcctcgttgtcgggcctgctcacgcgctaccagcaagccaaggtcaccatgacctcggtggaccagatgatggagctgccccaggagcgcaacttcgaagagcgccccatgagccgtcgcaccctgcaaggcgccatcgagtgccggggcctgaacttcacttacccgaaccagcagaacccggcgcttaaaaacatcaacctggtgatcaagccaggggaaaaaatcggcatcatcggccgcagcggctcgggcaaaagctccctggccaagctgatcgttggcctttaccagcccgactccggctccttgctggtggatggcgtggacgtgcgccagatcgacgtgagcgagctgcgtcacaacatcggctatgtggcccaggatattcaattgctggccggcaccctgcgcgacaacctggtcagcggtgcgcgctacgtcgaggatgaaatggtcctgcaagctgccgaactggccggcgtgcacgaatttgcccgcctacatccccaaggctacgaactgcaagtcggcgagcgtgggcagaacctgtccggcggccagcgccagaacgtcgccctggcccgtgcgctgctgctcaacccgcccatgctgctgttggacgaacccaccagcgccatggacaacaccggtgaagaacgcttgaagcaacgcctgcaagccgtggtgcaaaacaagaccgtggtgctggtcacgcaccgagcctcactgctctccctggtcgaccgcctgctggtggtcgaccgtgggcagattctcgcggacggcccgaaagccgtggtcatggaagcgttgaagaaggggcagatcagtgttgcttaactccatcaagagtgcggtcggccgctacttcaaaggctccgattcgctgcagggccagccgctgcccgaggtcaacaaggcgctgatcgaagatgcgccgcgggtgatccgcctgaccatctgggcgatcatcgcgttctttatattcctggtggtgtgggccggtttctctcagatcgacgaagtgacccgtggcgacggcaaggcgattccgtcgtcaaaattgcagaaaatccagaacctggaaggcggtattgtcgctgagctgtacgtcaaggaaggccagatcgtagaagccggcgcgccgttgattcgtctcgacgacacgcggtttgtctccaacgccggcgaaaccgaagccctgcgcctggccatgcaactgcgcgtcgagcgtttgagcgcgcaggtggatgaccgcccgctgaacatccccgacgacgtgctcaaggccgcgccgagccaggccgccaacgagcgctccttgtatgaaagccgccgccagcagttgaaagacgaagtcggcggcttgcaggagcaactcgtccagcgccaacaggaactgcgcgaattcacctccaagcagggccaataccgcagccagttgtcgctgcaacgccaggaaatcaacatgtccgagccgttggtggcccagggtgcggtgtcgccggtagaagtgctgcgcctcaagcgcgccgaaatggaaacccgtgggcagttggacgccaccaccctggcgatcccgcgtgctgaatcggcgatcaaggaagtgcaacgcaagatcgatgaaacccgcggcaaattccgcagcgaagccctgacccaactcaacgaagcccgtactgaactgaacaaggcagagtccaccggccgcgcgctggaagaccgggtcagccgcaccctggttacctcgccagtgcgcgggatcgtcaagcagttgctggtcaacaccgttggcggtgtgatccagccgggcagcgacatggtcgaaatcgtgccgctggatgacaccctgctggtagaagccaagatccgcccgcaagacatcgccttcctgcacccagggcaggaagcggtggtcaagttcaccgcttacgactacaccatctacggtggcctgaaggccaagctcgaacgcatcggtgccgacaccatcactgatgaagacaagaagaccacctactacatgatcactctgcgcaccgaccgcagccacttgggcaccgatgagaagccgctgctgatcatccccggcatggttgcttcggtggatatcatcaccggcaagaaaagcatcctcagctacctgctcaagccgatcatcaaggcgcgggccgaggcgttgcacgagcgttgatcttcagcgcctgtaccgacctcatcgcaggcaagccagctcccacatttgaatgggttcacaaatcaaaatgtgggagggggcttgcccccgatgaggccgtcagcatcacgctacagctcaaaccaaacgccatatccatatgcgctaacggtatttaagcttccatccttatgcctataaattcactcccctgtccgccgggaatgaatccaatgtctgccaccaccgccccccaaaccttcgacatccgccccttccccggcagtgtaggcgccgagatcatcggcctggacttgtcccgcccagtcaacgaccaggacttcacccgcatccatcgcgctcacctggaccaccatgtcatcgtgttccgcgaccaacgcattacccccgcacaacagatcgccttcagccgccgtttcggtgtgctgcaaatccatgtgctcaaacaattcctattggccaaccaccctgaaatcctgatcgtctccaacatcatcgagaacggccaatccatcggcctgggggatgcgggcaagttctggcattcggacctgtcatacaaagaactgcctagcctgggctcaatgctgcatgctcaggaactgccctctgaaggcggcgacaccctgttcgccgatatgcacaaagcctgggagcacctgccaggccacctgcgcaacgccgtcgaaggccgcagcgccgcgcattcctacacggcgcgctacagcgagaccaaattcgaaggcaactggcgcccaacccttacccccgaacagctcgcccaggttgccgaagtggtgcaccccgttgtgcgcacccacccggaaaacggccgtaaggcactgttcgtcagcgagggcttcaccacccgtatcgtcggcctgcccgatgacgaaagccgtgacctgctgggccaactctatgcccacagcgtgctgccggaaaacatctaccgccatcagtggcagccccacgacctggtgttctgggacaaccgctcgctgatccacctggccgccggttgcccaagccacctgcggcgcaaattgttccgtaccaccattcagggggatgcgcctttctaacccgataaagcctgctaggattgcgcccagttcactctcaacggaccacgagtgcttggcatgcaactaccggacatgaacctgctggtcgccctcgacgcgttgctcgacgagggcagtgtggtgggcgccgcacggcggatgaatctgagcccggccgccatgagccgcaccctcacgcgtattcgtgaagcggtcggtgacccgatcctggtacgtgccggccgtggcctggtgccgacgcccaaggcgcttgagctgcaaggccaggtgcgcaatgtggtggagcaggctgcgttgttgttccgttcggcggaccaagttgatttgagcaccttgcgccgtcgtttcagcgtgcgcgccaatgactttttcatcggcgtgtatggcgggcggctgttcgacaccatggagcgcgtggcgccgctgtgtgagctgcgtttcgtacccgaaggcgacaccgacgatgaagccctgcgcgaagggcggttggacttgcgggtgagcaacaccatgcctgccagcccggaagtgaaggtgcagaacctgttctccaccacctttgtcggcctggcgcggcaagaccacccgttgttcgacgaagaaatcacggcggcacgctttgccagctattcccacatcagcatctcccggcgtggcatcgcccgtgggcccattgataccgcgttgaatgctcaaggcctggagcgccgtgtggccatgatcgccccaggctttcacggtgcgatgttcatgctgcccgattccgacctgctgttgccggtacccaaggaagccctcctgagcgccaagcgtctgaacctgccactgcgcgcatttgccctgccgattccactgcaaaccctagtcttggcgcaatcctggcacccgcgcttcgacaaagacccggcccataaatggctgcgtgaaaccatgcgcgaaagctgtcatgccacctggcttgaagcccagccggtataaagcgaacgcaatcaatgtgggagctggcttgcctgcgatagcggcgcgtcagacaacatattttcatctgtcaggccgctatcgcagccaagccagctcccacagggttcagtgttgatgttcaaagttgcgtctgacgcacttataacctgccaacaagtaactttttgtcatgagagtgcccgattaaactgctcaggtatttctcattccgagttacctgttcatgacgtccctcgctgcccccgctatccaggccgcagccaaacctacggccctgagcccacccgtgttcggaccgcgcatcatcatcggcctgcttggcgtattgctggcggtgctggtctccggtctcaacgagatggtcaccaaggtcgccctcgccgatatccgcggtgcgctgtacatcggttttgacgaaggcacctggctggtcgctgcctacaccgccacttcggtcgcggccatggccttcgcgccgtggtgttcggtgacgttttccctgcgtcgcttcacgctgtgcgctatcggtttgttcaccgcgctgggcatcctctgcccgttcgcgccgaactacgaaagcctgttgctgctgcgtaccgtgcaaggcctggccggtggcgcactgccgccgatgctgatgaccgtggcgctgcgtttcttgccggccaacgtcaaattgtacgggttggccggttacgcactgaccgccactttcggccccagcctgggcacgccgctggcggcgttatggaccgaatacgtcggctggcagtgggcgttctggcagatcgtcgcgccgtgcctgctggccatggcggccgtggcctacggcttgccacaagacccgctgcgcctggagcgcttcaagcaattcaactggcgtggcctgctattgggcttcccggcgatctgcatgctggtgatcggcctgttgcagggcaatcgcctggactggttcgaatcgggcctgattaccttcctgctgtgtggcggcacagtgttgctggtgctgttcatgctcaacgaatggtcacagccgctgcccttcttcaacttgcagatgcttggcctgcgtaacctggcgtttgccctgatcgtgctggccggcgtgctgatggtgctgacctcggtgatcatcatcccgtccagtttcctcgcccaagtccagggctaccggccgctgcagaccgcaccggtgatgctgctgatggcgttgccgcagttgatcgcgctgccgctggtggcggcgctgtgcaacctgcgctgggtcgactgccgctgggtgctgggcattggcctgagtatgttggtgctgtgctgcctcggcagttcacacctgacttcggcgtggattcgcgacgacttttatggctggtacctgctgcagattttcggccagccgatggccgtgttgccgctgctgatgctgtccaccggcagcatccagcccatcgaagggccgttcgcctcggcctggttcaacaccgtcaagggcctggctgctgtaatcgccactgcggtgctggatacattgaccacccagcgcgggcatttccattcaaccatgttggtggaccgcctgggcaattcgccccttgccgacgctgacgcgccgggcctcgcccaccgcgtgcacgagcagaccgtggtgctgacctcttcggatctttacgtcgtcatggccggtgtcgcggtggcgttgatcctgctgattttctggatgcccacgcggatctatccgcctcgcgctccggcctgaccacaaggactttccatgaaacgcaaagacaaaattgccgtctccgttattgctgtatttgccgtcggcgtgctggtttacctggtcgccccgggcgtactgggcagcaagcaccagagcaccaacgacgccttcgtcgcggctgatttcaccctggtcgccccccgcgttgccggtttcatcaaggaagtgctggtggaagacaaccagcgtgtcaaagccgggcaactgctggcgttgatcgacgaccgcgattttcgcgccgccgcccaggccgccgatgccgacaccctcgtcgcccaggcccagctgaaaaacgccagcgcgaccctggagcgccaaagctcggtgatcgcccaggcccaggccaccgtggcagcagatcgcgccgaagtggcctttgccgaacatgaactgaaccgctacaaccacctcgccggcgtcggtgcgggcaccgtgcagaacgcccagcaagccaagacgcgcatcgaccaggccactgcgcgcctggctaaatccaccgccgtgctggccgccgaacgcaagcaggtggaaatcctcaccgcccagcgtgacgccgccgaaggtggactcaagcgtgcccaggcggcgttggaaatggccagttatcagctgtcttacacgcgcattgtcgcaccggtggatggcatggtcggtgaacgtgcggtgcgggtcggcgcctatgtgacaccgggcagcaagatccttgcggtggtgccactggccgaagcctatgtggtggcaaatttccaggagacccaactgtcgcacatgcacgcggggcaagcggtgcaagtcagcgtcgacagtcttgacggcgaactgctcaaaggccatctggaaagcctggcgccagccacgggtgtgaccttcgcctcggtcaaacccgacaacgccaccggcaacttcaccaaggtggtacagcgtattccggtgaagatcgtgcttgagccgaaccagccactgaccgagcgcctgcgcgtcggcatgtcggtggaagccagcgtcgatatccggcccgtcgagcagcagcgtgaggtggcccagcaatgagacacctcgcctggctcaccttgagcctgatcagcctgagtgcctgcacggtcggcccggatttccaacggcccgatgccccgcgcgtcggccagtggagcgaaccccagggccgccaagccgccagccgcgccgtcagcgacccgttgcaggaacgctggtgggacgtgttccacgatgagcagctctcggcccttacgcgccgcgccctcagcgataacctcgacctgaagctggccagcagccgcctgcaacaaagccgcgccatccgccaggtgactacggccgagcgctaccccaacgtcgatgccggcggcgcctaccagcgcaagcgcaacagcggcaaaggcttgagcgacccctccggcgagaatggccgctcggccttcaaccaatgggacatgggcttctcggcctcttgggagctggatttctggggccgggtcaagcgtgaaaccgaagcagccgacgccacgctggaagttgccgaaaacgatcgtcgcgccgtgttgttgtcggtgctggccgagaccgcccaggactatatccaactgcgcggcgtgcaaaacacccgcgctgtcaccgagcaaaacctcgacgttgcgcgccacagcctcaagctctcgcagttgcggttggccgacggcgtggccaccgacctggatgtggccgaagccgccgcccaggtcgcggctatcgaagcgcgcctgccggatctacagcagcgccaggaccagttgatcaacgccctgagcctgctgatgggcgagccgcctcaggccctgcacgcgcagttgtccaaagacgcccctgtgccgcaaacccagcgccaggtcgcgatcggcctgccatcggaactcgccgagcgccgccccgacatccgccaggccgaagcgcgcctgcacgctgccactgccagcatcggcgtggccaagggcgacttttacccacgcatcaccctgtccggcagcctcggctcccaagccatgcaactctcggatttcggctcctggggttcccgcgcctttgccttcggcccgcaattgagcctgccgctgttcaacggcgggcgcctgcaaggcatggtggatttacgtgaagcccagcaacaggaagcggccctggcctaccagcaaaccgtgctgcgtgcctggcatgaaatcgacgaccaactgacccgctacaacgccagccaactgcgccgcgacagcctggctgaagccgtgcgccagaaccagatcgccctcactaccgcacaacaccagtacgtcgaaggcgtggcggatttcgtcaatgtactcaccgtgcagagcgcgttgctggcaacgcaggagcagtgggtggaaagctccaccggcgtgtcattggccatggtcgggctgtacaaagcgttgggaggagggtgggagtcggtgtacccgttgcagaccgctgggcgctgagcaacaaagagtttttgtcagtcgccaaataagatgtaatgataattgctctcaataacacttctgagcttttcatggccagcgcgactgacggccagcaacagcttcacatcctgtaccgcgaccatcacggctggctgcaaggctggttgcgcaagcgcctgggcgaccgcgaacaggccgccgatgtggcgcaggacaccttcctgcgcctgctggtggccgggcgtttcccgggtgacaaggaaagccgcagctacttggcgcagatcgcccgcaacctggtgatcgaccaatggcgccgcctgcgcatcgagcgtgcttacctggaaagcatcgcgcacttgcccgagcccgagtcgccttccctggaaacccgcgccctgatcctcgaaaccttgatgcagatcgacgccatgctcgaccgcatgcccgataatgtacgccgtgcgtttttactttcgcagttcgaaggcttgagctatgcgcaaatcgccgagcgcctgggcgtcaccgtcagctcggtgcaaaagtacatgacccgtgccatcgtcgcctgctaccaggtggtgtacgaagaatgaagcacgacgcgcccattgcccccgcgattgttgagcaagccagcgagtggttgatgctgcaatggggcggtgagctcaagggcgagcagcgccaggcgtttgcccggtggcaggccgctgacccggagcatcgtcgcgcctggcagcgcttgcagcagctgcaacacaccctcggcggcgtacctgccgacagcgctcgcgcagtattgcgcgacaccccggatacccaacgccgtgccgcgctcaaactgctcggcctgttgttggtggccggtggcagcggctatctggtgcaacgcagcgagccctggcaagcggccttcgcagagctgcgtaccgccacgggcgaaattcgccatatgaccttgagcgacggcacgcaactggacctcaacagtgacagtgccgtagacctgcgtttcagcgctaccgaacggcgtattcggctgatccgtggcgaggtcttgctgaccagcggccacgacgccttgcgcccgttgatcgtcgaaacgccagccggcgatgtgcacgcgttgggcacgcgctttgcggtacgtgaactgcccgacggcagccgtgtggatttgtacgaaggtcgcctgcgggtcacgccgttgcagggcacgccggtgcatatgcaggcgggggacagcctgtggttcaacgcccgtcaaagcaccgcgttgccggcagtgagcgccaatgccagcagttggaccgagcatcgtctggttgccgagcgccagccgttgggtgagttcgtggcgcaactgagccggtatcgccctggcctgttgcgctgtgatcaggcggtgtcgaacctgctgttgaccggcgtgttcccgctgagcgacaccgacgcgatcctggcggccttggagcgttcattgcccgtgcacgtgcaggcggtgacccgttactgggtaacgatcaaggcgcgggtctgaaaatactttgtacagggcttgtcggtttttgtggcccgttcgggatacctcttgaaagccaatcaagaagcgttctcacggggagtcctgcaatgtcgcaccacccaatccaacctttggcccgcgcgctgcgtcgtggcctgtttgccggcctgctggcggcggctcctgtactgccgagcatggttcaagccgaggaaagcaccgaagcgctgcgcagctatgacattccggcgggcagcctcgaccaggcgttgaaccgtttcgccagtgcttctggcatcctgctgtcggttgacgctacgctcaccgaaggcaagcgcagcgccggcttgaaagggcgttatggcgtaggttcggggttgcagcgcttgctggcgggcagcggtttggcggcggtgcaatcccagggcggttggtcgttgcaggccctctccggcgacggagccttgcagttgggcgcgacccagatcagcggccggcaggagcaggaaagcgcctggggtccggtggacggtattgtcgccaagcgcagcgcctcgggcagcaagactgactcggcgctggtggaaatcccccagaccatcaacgtgatcaccgccgccgagatcaaggcacgcggcgcccagagtgtcacccaggcgttgctctacaccccaggcatgagcgccggcggttttgccgaccgggtcaaattgttcgatgagccgacgtcacgcggcttctcgcctacgccgttgtatttggacggcttgcacttgccctacggcggcggcagcacaggcggtgcgttgcagatcgagccgtattccctggagcgcatcgaagtgctcaagggcccggcgtccgtgctttacggccagaaccagccgggcggcattgttaatatggtcagcaagcgccccagcgaaacgccgatacaccaagtggtgctggaagccggcacctacgaacacaaaagcgcggccatcgacctgagcggcccgctggacgaggagggccagtttctctaccgcctgaccggcctggcgaatgacgcgcaagacgaaatcaattacgtcgaaaacaagcgccagttcatcgcccccagcctcacctggcgccccaacgacgacaccagcctgaccctgttcgcccaataccagaaagataaaggcgtgcccgaagcccaaggcctgccggcgtccggcacgctgtgggacaaccccaacggcaagatcaagcgcgatgtgtttatcggcgagccgggcgtcaaccagtacaaccgcgagcaatacgtgctgggctacgaagtttcccatcgcctcaacgacatctggaccctcaagcaaaacgcccgttacgccgaggtcgacgaccgctacaccgcgccattgcacggctaccgcttcgtcgccaacccaaacaccggcgtgcaagaccagcgttacctgcaacgcttcggcgtggactggtcgcagaccaacaaagtgttcggcgtggacagcatcgcccaggctgaatttgacacgggcgcgctgtcccataccttcatcgttggcctggactactaccattccaactcgcagttccatggcctgtatgaccgcaacccgccgatcattgacctgttcaaaccggtgtacggccagcccttgaacttcggccaaccgtaccgctgggatcgcaccattacccagaccggcctgtatctgcaggaccagatcaaattggataaatgggtgctggtactcggtggccgctacgactgggcgaatgtggtgaacaaggagccgatacaggacacccgctttgccagcaaagaccaggcgttcaccggtcgtgcgggcctggtgtacctgttcgataacggcgtgtcgcccttcgtcagctattcggaatccttccttccgctggccggcaccgatgcgaaccgaaaacccttcgaaccctccaccggcaaacagtacgaagtcggcgtgaagtaccagccaccgggccagaagagcttcatccaggcttctgtgtaccaactggatcaggaaaacgtgctgaccaccaacccggtggataccaccttcagcacccaaagcggcgccctgcgctcgcgaggtgttgaactggaagccaaggccgtcttgagcgatgcctgggacgtggtcgcctcggctgcgcgcaatgacgtcaaatacaccaaggacaacgatggccgccaaggtcgccacccggccggcatctccccactcaccgcctcgatgtgggtcaactacaccgtgctcggcgacacgcccttggcggggctgggtgcagggcttggcgtgcgttacgcccgtcaaagcctgggcgactactacgaaggcgccttcaacgtgccgtcctacagcgtctacgatgcaagcctgagctacgacctgggcgcctcgccgctcaagctcaagggcgtgaaactggcgatgaacgtgcagaacctcagcaacaagacctacgtctcgcagtgcaccagtgatctggattgctactacggggaagggcgtacggtggtgtcgagcctgacgtacgattggtaacttagcgtttaggtgatattggctgcggcgcgcacccttcaagggtgcgctctgttgccgccctacaccaggtccgctgcaaatcgtgtacacacattggaaagcatgcgcacctcggcaccgctacagcctgccgcttcgaaaaagccggaggcttctcgcacgacggcatatatatccgtgacgatggaccttgcttcatccgcccccaacccaaagcgttcaggcgtactcagcaaattactgacagacgatacccggccttcattgccgatgatgagcgcctgcaagcctagttgggtagggtggggcaacacgtcaaatactggcgcaagggaataacccgaggcgctggtcagcagcagcccggtttgtttcaggtggtcgtcgctattgccgatgagcacgttgaaggccatacgcttgtaaagctcgcgcatgtcaaaggtggcatcgtcgcagaccttcttcaacacgtcggcgatcctggaataggaaacggcaccgtcagccgcatcaacccgcattcttggcttctctgtgcttaccaaagagttgcagctgacatagtgctcgcggccagcgccttcatgtcggtcaaaacgctcgaccatcaacaccggtttgccggcgacctctaccaacttgtgcccggctgcgggtaggcctgctgcatccgccatttgaaggctggcgaattccgcccgtggctgatcgaacacatcgtcgctacggccgagtttagcaatccattccttgccttcatgggtcacggtgaccttcggcctggcgccgcccatggaactcccaaactcgaataaccgtgcgatttccgcaggcaggtcgacgtcacccttctcgactcgatcaaggcccaccatgattttctcaaggtcttcaaattgcggggggtggtgcaggggtggcagctgacttcgtgacgcactgaacagcaggcaacccactcctgctccccgcgaggcaagcagccattcaacttcgttttgtggatgctgtttgtgggtcgccagcagaacacgccggccccaattgtcgggcgttgcgtcgtcgagcacaccaaacatgcgcgtcgaggaatactggttaggggtcagtggcaaactcagcgggtcaatcgcaaatgcgtcgggccgcgcgagccaactgttggcgtagcgaaaaacgaatccattcccatgcatggccacctcgccaacagggaccgggtcaccgactaagtgagctgaaaaaacaaaggcattaccaatcggcttccaggacatcgggttctccttcagtgcgaattcgctcaggctcacgggcgaggctcatggtaatgccaacctggtcaagttctggtgacgcaatgctcgccataccttcttccaagtccatcgcgctcagcacattcatcagcacgccgagggagacgccgggctcgccctgtctcagccgctgatacgtctgccgtgtaatgcccgcgcggctgcatatggtggaaattttcaaccgacgacgaatgcgggctatttcgataccgttgccgatacctctcatcagttcatcgcttctctctgagatgtaccctttgtgggggtagggcttggctgtttcttgcatgatatatcaccctttaaagcagtagaggtaacttatatcatccaagtctctaaggccacctgcaaaaaatcggctcgatgccctaatggctttttgtaggagcgagcaagctcgctcctacaggtgttaccaaacttcaaagattctgcaaaaacaccacatacccccgaaaccactcattgccctgcaaatatcccggctcttgccattccccgccctgaatcaagccaatcttgaacggcacccccagccgattcatccgcggcaaatacgccgcgtaatccgggatgctgtgacgcccctgatacgtctgtaccaccacttcatccaccacgcccttgagctgggcgatggcggccgggtcggcgttgctgctccagtccatcaggccggtgatgctcaggcgcaggtcggcgggcaggcgttggcgcaggtcgcgcaggaagtcggcgtattcgtgcaggtattgggtgcgggcatcgaaatcgatctggataccgatcactgggttgccggcgtctcgccagcgttgcacctggcccagcacctgggtgtagacccgttccggccagcgcagggtgtgggcgcggtacaccacccagacgtggccttgagtaatgcgcggcacgctcatgccctgggcgatgagttgtacgccgcgctggggcgcgcggcgggtggagttgatctggccttgcaggatgtacagggtttttgcctgcttgatcactggctgcggcgtgacaccgctccacagccagaaggcgtcatagtccccggcgttaacggcgccaaaagccgggcttgccagcaacagcaagcctagccacagcggcttcaccagtagtactgcagcgatttgccccactgggtatcggcaaaaccggttttgagttggcggaaccaggctttgcgcaccgctggcgcgacatcttcgccgccgcagctgttgtagccggccggcgcgtagcagttgatggcgcggaacaacgcgtaggccttgtcggttttcggcgccttggcgttggcgatcacctgtttgtagccgtccaggcgcgagaaggtttcacccttgaagtccgaggcggtgctgcccaggctgccggcggcgcggggttgttccaggggcatgccgtccaggccgttgcgcaggatgaactcgccgaagcagttcaaggcgtgcgggtttttggcctcgttctgcaaggtcgtcgcggtttgcgcgatgcttgggcaggcgtagccggactcggccttgtcgccgttccattggaacagcttcaaggtctggccgctggtataggtgtagcccaggctggtgccgagcttgtcgtcagagagcgaggcctgcttgaggtcatcggcgaaggtggcgtactggccgcgcagcaggtctttgtagagcagcacgaattgcgcactctggcgctcgatcgggtcgctggcgttggcgatctgctgacgcagcagatcggggccggcgacgttgcgcagcaggatgtagcgcacttgcttggcgctgatcggcgagtcggcggcgaacaccttggccaattggccgctgcgctcgtaattcatggccagggccagttccagctggtcgcgttgcagcggctgcttggccagcggcagcagttgcagccacagggcttcggcggccctccagtcctgcttggcttccagggccagggcgcgcagggtctgttggctgaaggcgaagtaatccaggctcgacggcacatccgccggcaggtgcttcaaggccgcgtcgggttggtgttcgacgtacagggcatagctcgcttgcaggaagtcaaacagcgccggctcagtggcgaaggtgctcttttgcttatccaggtcttcacggctcaacagcggcggagtgtgtgcgcgcatcgccatcaggtcgctgaccacttgcagcatggggctgttcgcggctttgttgccgaccatcagtaacttgaggtcggcctcttccaccagttcgtccacgctcacattgcgctgggcgtcggtggcctcggtaaattgccaggtgaagtcttcggcaagcttggcgtcgtcgttcgccagccagtgcacacggcgcaacaggccacgggcggacgcaacgtaatcgccctgtggataatgtttcaggtaactgagaaaaccttcttcggcatcgctcaaggccgacttatccacatgctcgcgctgcggcatgccgtattcgtcgaaggcttcggcctgggcctgattcagcgacgtacgcgcagtcatgtacagcgctgtttccttcagccatggcacatcgctggtggcggcggcggcgaacccgcgctcggcgtaatcgaagcgcccgctgtagaaatcgccggcggcctgcaaataggtacgaaacaactgggcgttggccgagggggtcagctgtgcgtccaccacctggcggctccagtcacaggtggtcagtaattgcaggcgtgctttgaccaacacatcgcgctcggcgggcggcatctgggccttgatcacctggctgataaacgccgtggcgctgtcatcgtcattgctgcggcaacggctgccttcgccattcaggaaggcctggcctgcggtcttgtactcctcgcgcttgatacccaggggctggagcagcgtgtcgagttcggctgtgcgtgaatcgtcagccttgttatctggctcctcagccgtggccgcaaccggcaccaggcgatacaccggaaacggcaccgggccgaagccttgggccaagtcgtcttcgcccaaggcattgggggccaggggcgcggcttttttgtcggccagcaacaggcgcaggttcacccggctgtcgttaccagggctgagaaacggttggttgctgcacggctcgtagccgtcacgcgatacccgccagtcggggtagcacgagtcgtcagaactggcctgggccggtagggaaaaaccggccagcagggccagggccagaggtgacagcaaaccgatacgcataacgtttccttgatcctgagtccttggagaaggggcaataatagcctgatccgacgagtgcttcggtgaaggcctacacaaattgctgatttgtccgattccagcgacgaggccagggcttttggcctagagtggcggtgtttgtgcatgcgcagtgtttgtcctgtaagagggcagtagtagcggagtcgatatgcgtcggtctgtggtagagcaacacgaaaaagtcggggcattgcctgccttccatcgcttgacctgggaaggtgccggctggctcagccgcctgtggtgggtaccgatcctggcgctcgccatggccctgcggttttaccacctcacctcggcggcgatctggggcgacgaaggctcaagcctgttgctcagcgaatacgccctggccgacctgtggtttcacgcagcccatgatgtgcacccgccgctgtatttcttgctgctgcgcggttggatcgaggtgttcggcgatagcatcggctcgattcgcagcctgagtgcgatccccggtgtggccgtagtgggcctgggcatctggctgacacggcaactgtccacccgccgcgcggccgtgctggcggggatcctgctggctctactgcccacggcggtgcgctacagccaggaagtgcgcatgtattcgctgctgggcgtgtggctactgggcgccacgctggcactggtgtactgggtgaggcagcccgagcgcgcgcgttatttggctgtatatgtgctgttaatgagcgccgggttctatacccactacttcaccgcgctgtgcgtgctggtgcattgggcgtatctgggattgcaggcgccagctcaacgcttgattacgcgacctgcctggtgggccgccaacatagcgatagtgttgttgtatctgccctggctgcccaacctgctggatttggtgcagcacgtcgaacagctcaaagtcggcggcgacattggttgggaagagccggtcaacctgctgtcgctgccgtcgatggtctggcagttcctgttgcaggatgacggtctcggcctgtggccgccgctgttctggctgttccccctgctgctggccgtggtggttgttctggaggcctggcgcaaccgcgcggcgcgcctgcctgccctgttttgcctgctgccgctgctgctggtctatggcgtgtcctttatctcgccagtgtttatcgagcgctacctcacggtgtatgcgttaggcctgccgatagtcctggcgcttgccatcgaccgtttgccttcccgtttgtcctggctgggcgtggcgttgttcgcgctgtttgtgggcgtagaactgctggggttaaagaacaatttcgaggtggatgaacacgaccagttcaacgtgccggtggagttcgtcaatcgcaactatcaggaaggcgaccgcatcgtcctgagtgacatgatgtggtacctcagctacgtgtattacgaccagaccgacgcccaactgcagctctacacgccgcccaagcccgacggcactgccactcgcccgaacgcctatggtttcggcacactggtggaccaggacggtggccgcatctatctggaccgcctctcagcactgcctgctcaaacgcgacgggtatggttgatcagcagcaacgaagccccggatgaattcgcgccactgcccaacggctggcgcgaactcagtcgccaggacggcggtggcgccagggcccggttgttcgtgctatgcaacgcaccggcgccgcaacctgaaggctgccgctagactcacttcaacctactgatgaggagcctttcatggaatcgccactgcacagcttgccggctttgttcaaacagcttggcttgccggatgacccggtcagtattgagcaatttgtcgcctctcattcgccgctcaagccggatttgaaactggcggaggcgtttttttggagcgacgcccagaaggcatttttgcgtgaagagattctggaggatgcggattgggcggtggtggtggatgagttgaatctgatgttgcggggtgggcgaggggtgcaaaaaaaatagctgccaggctctaacttgaaaaaatctggtaagggttgaaaaaaatttggttttgaccgcgcaaattatttttttctgaaaaagcccggatacgaaaaaatatgggaaacgtcctatttttcatggggaaatggactatagccgccgcagacggttttccttatcaaagggatatctcctattgatgagcgggtgcgacatgcaaaagctaattccgcgcggaaaactacagagttttgatccttcgactattgaactcataagtccattttctgcgacgtcaattgttgaatttcatcttccgtttacttctggtttgcttgggctgtctgagcttattaaagagtgtgatgtaggtttaaattcgtgtgtaaattggaaggtgcgaaaaacgatactttacaagattaaaagcggagagtggttgcttgtttcagaacggacgggggctttgaatcacttgcatgcacagcgatgtattccaagtgggttctcttctggccggtttgaaagcgaggaggaggtagggccgggaaaatgggcttttttcagcattgactatgacgcagtgaagaacaccgcgattatagctgccaatcgtttagggtctatgggtgaccaaggtcgagtatttggttctgacggcaaagatttagcaaacacgaccagaacacttatccagcaatgggtaccactgaatgatttcgaagagcaccgcatcgccgactctgccgtacgtcgatatggcgagcttcggcatactccgcaaaggtttctggagggcgaggacaagtggcagattggcgggaaatcatggcactggcagccagtcacaccagatgaggcgtatgaaaaaaaggagggtgcaaaatgagccgtcgcagaatttggctgttttggggagcgatggatgcgatttatctcatttggtatgcgtccaatagttttttaaacaatagaattccgtatttaagtgatgtgataagcgcttcaaatgttttgcgagcgcacggtgatgtgcaaatagttatgtttgtgggggcgttggttttacaggcctcaatttttgcatcctgcgccatgttttttcttcagaaaaaatcagtcgtgtggcttgtcttttttcaaacccccttacgacttgtgctcgttatcccctccgtttcgctcctgttgattggcgctcgagttttgccgcagtacaacgtgctggcaatggctggattgatcggtgcgtcggagattttaaaagtctggagcgtgtggcgatggagcaaaaaatgctgacgctggcctaatgtgggagcgggcttgcccgcgaaggcggcgtgtcagtcactgaatattcaactgaaccaccgctttcgcaggcaagccagctcccacattttgtttgtcgtatggcgaatatcagcgatttgctgatgcctaccctaaaacccgctttactcaagccacatcccaccactcatctgcgaaattgtttcaaaacttgacggcgaacccttcctccaccatattgatagttagcaaactaactgtatgcgaactatccagtgcctcaatccctcgaacaactccagatgagcctcagcagcagcatggtggtgggcgcccgtaattggcgcaaaatctgccagaccacgctggtcagctatggcatctccgaagcctgcgccgtgccgttgttgatgatcggtcgcttgggcgacggtgtgcatcaggtcaaagtagcccaggcgtccggtatggaaagcccatcactggtgcgcctgctcgaccggctgtgcggtgacggctacgtctgccgcaccgaagacatccacgaccgccgcgccaaggccctgagccttaccgagcgtggccgtgagttggtgcaagcggtggaagcgcaactggtgcgcctgcgcaaggatgtgttagcagatatcgcccccgacgatctgcaagccgcactgcgtgtcttgcgcgccttcgaagcggctgaggctgtgtcgtcttgaacggattttttaccggcttcccgcctgcccgcgactggttctacggggtgcgtaccttcgccgcgtcgatgatcgcgctgtacatcgccatgcttatgcaaatgccgcgtccgtactgggcgatggccacggtgtatatcgtctccagcccgtttgtcggccctaccagttccaaagccctgtaccgcgccatcggcaccttgatgggcgcggcggcggcggtgctgtttgtgccgatgttcgtgcagtcaccctacattctggtagtggtgattgcgttgtggaccggcactttgctgtttctgtccatgcacctgcgcaccgcgaataactacgccctgatgctggccggctacaccttgccgctgattgctctgccggtggtggataaccccttggcggtctgggatgtggcggaggcgcgtaccgaagaaatcttcctcggcattgcggtcgcggcggtggtgggcgcgatgttctggccccggcgcctgatgccggtgttcgatggctcggtggccaagtggttcagcgacgcgcaggtctacagccagcgctttctcagccgcaaggtcgaccccgaagaagtcagcaacctgcgcggcggcatggtcgccaccttcaacaccctcgaattgatgatcggccaactgccccacgaaggcgcgcgcccgcagacggtgcgcaacaccaaggaactgcgcgggcgcatgattcacctgctgccggtgatcgacgcgttggatgatgcggtgtacgccattgagcaccgtgcgccggagtttctcgatcagctcacgccgctgttggaagaggccaatgcctggctgcaaagcaccaccgaacaagcgcccctggatcgctggcgcgtgctgcgtgacaagatcgacgccgcgcaaccccaaggcgaagcgctggatgaccgtcacaccttgctgttctccaacgccctataccgcctgggcgaatgggtcgacctgtggcaagactgccgcagcctgcaagccgccattcagtgcgaaagccaggacacctggcgcgctgtctaccgccactggcgcctgggccggctcacgccattcctcgaccgtgggctgatgttctactcggcgttttccaccgtcaccgcaatcattgtcgcttcggtattgtggattctgctgggctggaccgacggcggcagcgccgtgatccttgccgccgtcgcctgcagctttttcgcctcgatggacgacccggcgccgcagatctatcggttctttttctggaccgccatgtcggtgctgttcgccagcctgtacctgtttctggtgctgcccaacctgcatgacttccccatgctggtgctggccttcgccgtgccgtttatctgcatcggcacgcttacggtgcagccacgtttctacctgggcatgttgctgacgctggtcaatacgtcgtccttcatcagcatccagggcgcctatgacgccgactttctcaacttcgccaacgtcaacttggcggggccggtgggcctgctgttcgcgttcgtgtggaccttgatcgcccgacccttcggcgctgaactggcggccaagcgcctcacccgtttcagctggcgcgacatcgtcagcctcaccgagcctgccaccctggccgagcaccggcacatggccgcacaaatgctcgaccgcctgatgcagcacctgccgcgcctggccctcaccggccaggacaccggcatcgccctgcgcgacctgcgcgtggcgctgaacctgctcgacttgttggcctactcgccacgcatcctcggtgtgccacgggtgttgctcaaccaggtggtggaaggcgtgggcggttacttcaaggcgtgcctgaaggcgggtgaacgcttgcccgcgcccagcggtctgctgatgaccctggaccgcacgcgccgcgccctcaacggccagggcctgcaagacgaagacgacacgcgcctgcacctgctgcacgccttggccggcctgcgcctggcgttgttgcccggtgtggaattcattggcggcacggaaatggaagcgccgctacccgatggagcgcctttatgatcggtgacctggatatcagcggggtgttcctgcccacgctgctggtgctgatgggcattacttatgtgttgtttctggtggtgcacgggctgttgacgcgcatgcacttctatcgcctggtctggcaccgggcattgttcaatgtggggctctacgcgctgttgctgggcgctgtggactcactcagtcgatatttgatgacatgaaaaaaccttttttgactatcggccgtgtcgtcctgacgttgttggtcgtgagtttcgcggtcgtcgtggtgtggcgcatggtcatgtattacatgtttgcgccctggacccgtgacggccacatccgtgccgacatcgtgcagatcgctccggacgtgtccgggctgatccagcgcgtggacgtgcgcgacaaccagttggtgagcaagggccaggtgctcttcgccgttgaccaggaccgcttcaagctggccctgcgccaagcccaggctgccgtggccgaccgccaggaaaccctggcccaggcccagcgtgagtacaagcgtaaccgtggcctgggcaacctggtgcccagcgagcaactggaagagagccagtcccgcgtcgcccgcgcccagtcggccctggccgaagcccaggtgacagtggactccgcccaactcaacctcgaccgctcggtgatccgcagccccgtggacggctacgtcaacgaccgcgcaccgcgtacccaggaattcgtcaccgccgggcgcccggtgctgtcggtggtggacagcaattccttccacatcgacggttacttcgaagagaccaagctcgacggcatccatgtcggcatgggcgtggacatccgtgtgatcggcgacaatgcgcgcctgcatggccacgtgcaaagcatcgtcgccggtatcgaagaccgcgaccgcagcagcggctccaacctgttgcccaacgtcaacccggcgttcagctgggtgcgcctggcccagcggatcccggtgcgtatcgccttcgatgacgtgccggcggactttcgcatgatcgccgggcgcaccgcgacggtgtcgatcatcgacgacaaggtcaaagacggggacaaaccatgaagcggcttctggcaaccgcttccctggggttgttgctgtcggcctgccaagtggtggggcccgattacaaactgccggaacaggccgccgtcaaccgtggcgacctgcaagggccgatcatgggcgagggcagcaacgtcgtctcggcaccggtgccggccgattggtggaagctgtacaaagacccgcgcctggacgaactggtgcgccaggccatggcctccaacaccgacctgcgcgtggccgccgccaacctgcagcgctcgcgttaccaggtgcagcaggctgaatccgctggcggctggagtgccggcgtcaaggccgaggcccagcgcttgcaggagtctggcgaggccttcttgctgccggacaaagtcccggtcggcaatatcggtagcgtcgggattaccacgtcttatcaattcgacctgttcggcaccttgcagcgtggcatcgaaagcgcccaggccagcgccgacgcgacccaggccgcggcggatatcgcccgcatcaccctggtggccgatgtggtgcgctcctatacccaggtgtgcgcggccaacgaagaactggcgattgccaacgagtccctcgacctgcaagcccagagcaccaaactgacccagcgcctgcgcgatgccgggcggggcgatgagactcaggtgactcgctcgcaaacccaatacaaatccttgcgcgccgacataccgcgctatgaagcctcgcgtcaggcggcgctgttccggctgtcgatgttgctggccaaaccggtcgaccaactgccagccggcacgggcacctgcgctgagctgccgcatatcgctcaattgctgccagtaggcgacggcgccacgctgctcaagcgccgccctgatgtgcgccaggccgaacgccaattggccgccgccacggcacgcatcggcgtggcgaccggcgcgttgtacccggatatcagcatcggcgccacggtcggcaccgtcggcttgctggaaaacctcggcacgcctgctaccaaccgctggggctttggcccaatgatcagctggactgtaccgaccaacggcgcccgcgcccgcgtgcatgaagctgaagccgcgacccagggcgccttggcccacttcgacggcgtggtgctcaacgccatccgcgaaacccagaccggcctggcccaatacaccgccgtgttgcaacgccgcgacgccctggccgacgccgaacagtcggcgcgagaagccgccggccagacccatcgcttcttccaggccggccgcgaatccttcctggccgacctgcaagccacgcgcacctacaccgatatgcgtgcgcaactggcggcggccaacacccaggttgccatgagccagatcgatctgttcctggccctgggcggcggttgggaaagcggacgaacgcaaggggtcaaacccggcaaaccgtgaggtgattgctatgctttgtcaggtgaggcgtcgtgacgcttcacccgacaaagctcgcgtttgctcatggggattccaagaatgaaaaacccttatgctcccgctttctggtgcgtgctcttcgcactggttttgttatcggccgcgtatttttacggcgtcatgctcgcccatcaactcgacaaggccatggtgttcctcgacagcgcctgcctggtgatcggcaccttatccatcggcgtggtggcctgggcgtcgtatcaaaaccagcgggtgaagaaaaaactcctcgaacagggcaagacccgcgtggcgatctgggacaccaaggtcgccctgcgccgcgtcgaaaccgtgttcgaccgctatttctggggcagttactggcagccggggcgcacgttccaggaagtcatgggcgacctcaccggcacgccgctggaaaaaagcctcgaagtcctgaaaaaacaatgcgtgctgctggaccgacaggttgctgacggtaggcactggctggataacgcgcgggaattgtccgacgtggccacgcaaatggcccgcgagcgctaccagctggacttttgcgaccccaaggccgacacccccggcaatgccgtgatacaccgcgagttcgaggtgctggtgtacacctggaccgcgcgcttgaagagttttgatcaccaactggatgaagtcgaacaagagtactcctgaactcctgctgaactgatccctctgaaaggctgggccgtttacgcccgccagtgctaatcttcccccgttttcggcgggcttgagccaatcccctcaggggttcaaggaagacagcccacttctcacaggatttgatcaggtcacttcatgaataagccagccgttgttttcttgggttttgttgtcgccgtcggcgccgtcagtgcgggcggtgcctggtacaccggtaaacaactggagccggtcctgcaaaccgctatccagagcgccaataaagaactgcagacctccatggccggcgtcgatggcagcgtgaccctggagctggtgtccctggaccgtggcgtgttcagcagcaccgcgcattatcgcctcaagggccaaggcagcgtgttcggcgaagacaacccgaaccctgaattgctgttcgtcgaccatatcgaacacggcccgctgccgttctcgcgcctggtgaccctcaagtggttgccggtcatggccaccagtcactacgaactggaaaagaaccccaccaccgaaaaatggttcgccgccagcaaagacgtgtcgccgctcaaaggcgtggcgaatatcggctatagccgttcggtcagcggcaacatcgaattgctgcctctggaattcaaggatgccacctcgtcggtgagcttctccggcgccaacctcaacttcgacagcagcgccgaaggccagaaggtcaaggccgaaggcttcatgaacagcctcaaagttgccgcagtggacgccgaaggcgcaccgttcgaagcggaactggccggcctgaccgtggccagcaacctggaaaaaaccaccttcggtttctacaccggccagaacaccgtggagctgaccgacaccaaggtcaccttcggcccgcagaaagccgtgttgaccctcaaaggcttcgagcagaaagactccagcgagaccaaggacaacaacctggctggccgcgtcgactacaagatcgacgagatcggctaccagggcaaagcagtcggttcggccgccatggccgtgagcatgaagaacgtcgacatcccggcgatgctggtgctgaccaagctctaccaggacaaaatgcaaccggtgcaagccgccgccgctgccggtcaaccggtgccggagctgcaaatgaccgaagccgagcaagccctggccgaagccaacgtcaaccaggtgctggccgccaagccgcaactggccgtggaaaacctgtcgctcaaaaccacccgtggcgaaagcaagttcaacctggtggtggacctgaccaagccaacgtccatggaactgccaccggttgagctgggcaagcaaatggtctcgctgctggatgccaacctcaccctgtccaagccgatgatcagcgacgtggcggccctgcaagcccaggtgggcggcgtgaccgacccgcaagccatcgagcagcaatcgcagatggcggccgagatggtcagcagcatggcggtcggcactcaactggcgaccctggtgggtaccgatgtggtctccaagctgcactacgccaataacgaagtgaccttcaacggccagaagatgaccgttgagcagttcctcagctttgtgatgtccaaagccggtgcggtcagcggcgcccaataaacctgaaatgcagtaaaaaatgtgggagcgggcttgtgtgggagctggcttgcctgcgatagcatcgcctcggtctggctgaataaccgaggtgcctgcatcgcgggcaagcccggctcccacccgaatccggctcccacgtttgttttttgtgaggggcaaaaaatattaatcgtacaattctgaacaattgttcgaaattgtgcttccccctacttcgctaagagatagttcctacaggaaagctaggtcgggtcccgagacgccgacaccctgatgcgtttcgctcaggaccatctatcgttagggctttccgtgtgtaaggaagctcacgatatgctgcgaaaccacccctacagtgcctcaggccggttgcgtctgcttatcggggccgccctgtgcagccaattgctggttccaggccttgcgtttgccgacccagcctacgacgccctgatcatccaggcccgcaacggccacttcacgccggcgctgacccaactgcgccaactctccgccgaacgccagaccccaggccaggtcagtgaccacctggtgattgccggctgggccgggcaagacgccgaagtgctcaaggtgtacgaagcgcagggcaagcatcgcaaccttaccacccaggcactcgccaccgtggcgcgcacttatcgcaatcaaaagcagtgggctcaggccgaagcggtctatcgccaggcgttgctgcgtgaacccaataacatcgacctgcaactaggccaggccctcacccaggccgatggcggtaaagccaacgaagcggtgcaacgcctgcgtacgctggtggcggcccaacccaatgaccccaaccgccgcatggccctgggctatgcgctgacacgtgccggtttgaactacgacgcgctgttcgaatttgaccaagcctttatccgcgccggtgacaagcccgaagtggcccgtgaatacatcgtcgccctgcaaaaggcgcggctgccggagccggcactgcgcctctcagccaagcgcccggggctggtggacgccgtcacccagcgccgcctcgaaggcgaccttgccgccgagcgtgtgcgtatggccgagttcgccacgcgcagcgaaaaggaacgctacgtcatcgctgaccgtgccctgcaggactacgacaaactgatcagccgctgggcccccgacgccacagcgaagggcgatgtcatccgctggcgcatcgaccgtctgggcgcgctcaaagcgcgagcacggcatgccgaggtgatccgcgattaccagaccctcactggcgaaggcgtgcaactgcccacctacgccttgcgttgggtcgccggctcttacctggaacagcgccagccggaaaaggccgagccgttgtatcgccaggtactcaccgcccccgacaccgacgccagctatcgggtcgatgacagcacggcgctgttctacgccttgttggaaagcgacaaggtcgaagaggcccgccaggtcgccaacaacctggccaaggagcaaaacccccgcgttgaactcaagggcttgcccattggcaaccccaatgacaactggatggacgcccaacaattatccgcccaggccggtacctatggcggtgacctgcctggcagcgaggccagcctggaagcgctggtggccaaggcaccgggcaacgtgggtctgcgcctggcccaggccgacatgtaccgtgcccgcgactggccgcgccgcgccgaaggcacgctcaaggaaaccgaaacccaggccccccgcgacatcggcctggaagtctcccaagcctataccgccatggacttgcaagagtggcggcagatggacacgctcaccgacgacgtgctcgcccgcaacccggacaaccgtcaggtgcagcgcctgagccgcctgcgcgatgtgcacgacatggccgagctgcgtgtcgaggcctacaccggcaaaagctacggtggcggtaataacaacgacgccggtgccgtctccggcagccgagactggggcattgaaagcgtgatctacacgccgcccatcgacgaagactggcgcctgttcgccggtgccggctatgccaccgccgacttcgaggaaggcactggccaacatcgctggcagcgcgtgggcgtggagcgtcgtacccgtgacatgaccatcgaagccgaagtgtccaaccactcctatggcgacggttccaagcaaggcgccagcgtgtcgattgcccgcgacatcaacgaccactggcaatacggcggcagccttggctatttgctcagcaccacaccgttgcgggccctgaatgacggcgtcacagccaacggcggcagcggttttatccgctggcgcgccaacgaaagccgcgaatggaagctgaccctcagcccgtcccatttcagcgatggcaacgaccgcttcgaagccttgctcaccggccgcgaaggcctctacagctcgccccatgtgcaagtggacctgggcctggaagtgggcgccagccgcaacagcaaggaagacaccgtgtacttcaacccgaagtcggacttcacagtgttgcccatgatcaacgtcaatcacgtgctctatcaccgctacgaaacccagtggagtcagcagttccaaatcggcgcgggtacctacagtcagcgtgactattccaccggcggtatcggcttgattggctacggccaacgctatcgctggaacgacgtactggaaatgggcgccaacctcagcctgatcagccgaccttatgacggtgatcgcgaacgcgatctgcgcctgctcgtcgacctcacttaccgtttctaaaagagcctgaccatgaccgtcctcagccgttgcttgttggtcctgggtgtaatgctggccgccgcctgcgcccaacaacccgcgccctacaccccacccgccgaacggccgatagcgcccaacgaagcgccgtggccgaagaaccactttttgggcattgcctatcacgacgtggaagatcgcgaccccgatcaagccgtggtggcggtgcgcacagagcgattgatcgagcagctggcctggctgcgcgaaaacggctaccaggcggtcagcgtcgaccagatcctggcagcccggcgcggcggcccggcattgccgcccaaggcggtgatgctcagcttcgatgacggttattccagcttctacacccgcgtgatgccgattctgcgcgcctaccactggcctgcattgctggcgccggtggggtcctggatcgacacgccgttgaatcaaccggtggattttgccggtacaccacgaccacgcgcagagttcctgacgtggcagcagattcgcgaagtgtcgcagtcgggcctggtggaaattgccgcccacaccgatgccaatcacaagggcatcctggccaacccccagggcaacctggaaccggccgccaccacgcgggtttttgaccccaagaccaacggctatgaaagcgaagcgcagttccaggcgcgcatgcgggctgacgtcgccgcgatttcgaacaaaatccgtaccgtcaccggcaaggcgccgcgtgtgtgggtgtggccgtacggggccgccgatggcacctcgttggcggtggtcggcgagcacggctatgaaatggcgttgaccctggaggacgggctcgacgacctcggcaacctgatgaacagcccacgctttctggtggcctccgacccggacggcgagcattttgccaacagcatggtggccgtgcagaccaaggcgccgatgcgcgtgctgcacgtagacctggacaacgtgtacgaccccgacccagcccaacaggcgcgcaacctcgacgtgttggttcagcgcgtggtggacatgggcgctggcaccgtcttcctgcaagcctttgccgaccccaagggcgacggcctggtgcattcgctgtacttccccaaccgccacctgccgatgcgtgccgacctgttcaaccgggttgcctggcaattgcacacccgcgcccatgccagtgtgtacgcctggatgccggtgctgagttttgccctggaccccaagttgccgcgtgtcacccgctgggacccgaaaaccggccaggtcggccccgacccggatcaatacaaacgcctgtcgccgtttgatcccaaggtgcggcagatcatcggtgagatctaccaagacctggcgcgtgtagggccgattgacggcatcctttaccacgatgacgcggtcttcaacgacttcgaggacgccagccccgcagcgctcaaggcctatgcggcccaaggtttgccggacagcatcgccgccctgcgggctgaccctgccgtgatgcagcgctggacccgcttcaaaagccgctacctgatcgactttacccatgagctcaccgccaaggtccgcgccatccgtggcccgcaggtgctgacggcgcgcaatatcttcgccgagcccatgctcaaccctggcagcgaaacctggttcgcgcagaacctcgatgacttcctccaggcctacgactggaccgcgccgatggccatgccgttgatggaaggccaggaagtgaaaacctccaacgcctggctggaaaaactcatcgccacggtcaagacgcgccctggcgccatggaaaaaaccatcttcgaattgcaagccaaagactggcgcacccaagccgcgccggatatcagcgctgagcaattggcagagtggatgggtgtactcaaacgccagggcgtcaccagtttcggctactacccggacaacttcctggaaaactccccggacttgaagaccatacgtccggccctttccaaccagtggaacccttgatcatggttgacagaatcctggctatattcgtgctggcactggtactgggcttgcccctgggcctgatcttcctggtgaccgggcagttcctgatggacttcgtgttcttctacccgttgttcatgtcggcgttgtggatcgccggtggcctgtatttctggctgcactgggaacgccactggccgtggaaagaagacacgccggcgccgaccctggccggcgagccgctgatctcgatcatcatcccttgctacaacgagggcgataacgtcgctgacaccattggcgcggccctcggccaggtgtacccgaacatcgaagtgatcgcggtcaacgacggctccagcgacaacaccgccgcagtactcgatgccctggcgctgcaacacccgcgcttgcgcgtgctgcatctggcacagaaccagggcaaggccgtggccctgcgcatgggcgccgtggctgcccgcagcgaatacctggtctgcatcgacggcgatgccttgctcgacaaaaacgcggccgcctacatggtcgcgccgatgctcgacaacccgcgcctgggtgccgtcaccggcaacccacgcattcgtacccgctccaccctgatcggccgggtgcaggtgggcgagttctcctcgatcatcggtttgatcaagcgtacccagcgggtgtttggccggatcttcacggtctccggtgtggtggtggcgtttcgcaagaaggccctggaccgcatcgactactggagcaccgacatgatcaccgaggacatcgatgtcagttggaagctgcaactcgatcactgggcgatcttctacgagccgcgcgcgctgtgctggatcctcatgcccgaaaccgtcggcggcctctggaaacaacgcctgcgctgggcccagggcggcgccgaagtgctgttcaagaacatccgtggcatctggcaatggcgccaccgctacctgtggccgctgttgttcgaatactgcctgtccaccggctgggccttcaccttcctgctgtcggtgatcttctgggccgtgggtaaattcgtcacgttgccggcggcgatcaccgtgagctcgttggtgccgcccgcgttcaccggcctggtgctggcgatggtgtgcctgctgcagtttgcggtgagcatcctgatcgaccggcgctacgaaaaagacctgtggaaaaccctgttctggaccgtgtggtacccgatggtgttctggctggtgagcctgctcaccaccctggtcagctttcccaaggtgttgttcaaccaacaccagaaacgcgcccgctgggtcagcccggaccgcggtatcaaacctgcacaagaggaggcgtgagcatgaaactggtcagaactcgccaaaacacactgatgtgggtcgtcgatgtgctgctgaccctgctggcctggggtgggttgatctggctgctggcgcgaggcatcagcgccatgcttgaaacccacggcggcccacgcattgaggcgcctatctttgctgcgctcaacaccttgcaggtttacctgtggatcgcgctgttcaatgcggtgatcctgatcagctgggcacgctatcagcagcatcgcgggcgcaaattcgcccagcgccgcgccgaggcgaatgcactgagcgaccagcacctgagtgaaagtttcaacctgggcgatggcgacctcgaacaactgcgccgccctggcgtgctggtgatccacaacgacgaagaaggcggcgtcgaagaagtgaaatcccacgtctcccgcgacgtcgaacgccccggcctgaccctggtgcccgacaaagacaagggcattggctagcgttaagcgaacgcaatgctcaaagcaatgaagatccaatgtgggagctggcttgcctgcgaaagcggtagtgcagtaagagttttattaactgacacaccgccttcgcgggcaagcccgctcccacaggtagtatttccacccatcgctgcagtggttcactcctcttgttggaattccgataaatgggatccaattcacaaaacccccgcgaacttttcccccttctccggtactaacctaactcgacgaacacctgatggctaagtaatggcagtcagaaagtcattcgtcgaatcgccatcaaaacagttgccgcttgtcggaataatcactgtaagtgcccgacttaaactcttttgatgaaaaattattattaataatcaacaggttagaaaactaatcagtcgaacggccccacttcgcccgtttctaggcgagctggaagttcgatgttagtttcgcggcccttgattttcgatggatcgaacatgtcttcgttattgccatggacccggttattgctctgcaccttcctgctcacctgcgtgggcctgaacagtgcatccgccgcccccacgcctggcgatcaggatttgatccgcgaccggcagaaccgcttgcttgaagagcaacagcggcggctccaggaactccaggacctgcccggcaaagcggacaagccccaagccccggcaaccccggccgacacccgttgcttccccatcaaaaccatcgaactcaaaggcgccgacagcctgccggcggccgaccgcgagcgcctgctaaagccctatatcggccaatgcctgggcgtgtcccagctcaacgagctgctcaaggtcatcaccgactactacttgggcaaaggccgcgttaccagccgtgcctacctgccacagcaagacctctccaccggccatctgcaagtgctggtggtggagggcaagctcgaagccctgcgcagcgccgatggcagcacagtgaccgaccgcgaactggccatggcctttcccggcaaagtcggcgaagcgctgaacctgcgtgaaatcgagcaactggtggatcaactcaaccgcctgccgtccaaacaggcgcagatggaactcacccccggcaagcaaatcggcggcagcgatgtggtggtcaagaacactgcgcaaaagccctggcgcgccagcctgtcgcgcaacaacgacgggcagaaaagcaccggcgaacagcaatggggcgccggcctggagtgggacagcccactcggccttggcgaccaactgatgctgcgcggcggccacgacgccatcagcgaccaccagaaaacctcgaaaaacaccatgctctactacaacgtgccatggggctggtggaacttcagctacacctacagcgagagcgactaccgcacctacggcatcgccgacggcttcaaatacaagcaggacggcgacaaccagaaccaccaactgcgcgccgagcgggtgatccatcgcgacgacgtcagcaagacctcggtcaacgtcggcctggcgcacctgcgcaccaacaactacatcctcgacgtgcgcaccgcgcccagcagcaaccgcctcagcgaactgcaactgggcgtcaaccacgggcggcgcatcggcagtgccttcgtcaacctggacctgggcatgcaaagcggcatcggcctgctcgacgcccaggcgcaagacgagcgtgacccagcaggccgtcgccagccgaactcgcgctaccgcaaatacaccgccacggtcagctacctgcaacccttcagcctgtggggcgagtcgttcagcttcagcagcctggccaccgggcagcgcagcgaagacccgctgttttcgccgcaacgcatgagcctcggcggctcggcctcggtgcgtggcttcaaggaccaattactgaccggcgacagcggcggctactggcgcaacgaagtgcgctgggcgcgcccggtgaccctcgactggatgcgcccggccttcgccgagtacggcgccagtgtcggctacgaccaaggcgtgatccgcaacgaccgctacaacgacaacgttcatggccgggtgtccagcaactccctggagctgttcgcccgtggcaaacacgtcagcaccagcgtgacctttgctcattcgttagaaagacccggtgtagtcaccgagcgcgaagcgccgatctactttcgcatggatttcttcctgtaattcaacgccccgctgcatgagagcctgacaatggatgttcgccaattcgccttcctggcccgccaaccttctgccgccctgaagcgccgggacgcgttcttcggcctgcccaagcgcgggctggcgttgatccttgccaacgcactgttctggcagccgctgctggcccaggccgagggcattgtggtcagtgcgccgggcaccaccgtgggcgcggcaggcaatggcgtgccggtggtaaacattgccacccccaatggcgcgggcttgtcccataaccagttcaaggactacaacgtcggccccaacggtgtgatcctcaacaacggcaacaccgccatggtcaacacccaactgggcgggatcattgtcggcaaccccaacctcaagggcggcgcggcgaacgtcatcctcaacgaagtcaacggcggcagccccagccagttgcgcggctataccgaagtggcggggcagtcggccaaggtcatcgtcgccaacccgtacggcgtgacgtgcagcggttgcggctttatcaacacccccaacgtcaccctcaccaccggcaaaccggtgctcgacgccagcggtcaattgcagcgctatgaagtggatggcggcgccgtgaccatcgacggccagggcttgaacgccagcaacgtcgaacgcttcgacatcatcacccgctcggccaagatcaacgcacaaatcaacgcccgcgaactcaacgtgatcgccgggcgcaacgacgtcgatgcgcaaagcctgaaaaccaccgcccgcgccgatgacggcagcgccaagcccgagttggcaatcgactcctcggccttgggcggcatgtatgccggcgcaatcaaactggtgggcaccgaggccggcgtgggcgtgaagctcgacggcaccctggcggccagtggtggcgatattcagctcgacgccaacgggcgcctgagcatggcgcaaacggtggccaccggtaacgtcaaagtcaccgcgcaaaacgtcgacctcaccgacaaggtctacgccaacggcaacgtgcaggtcaccagcgcccaggccctggtcaaccgcaagagcatcgccgccggccagcgcatcgagatcaacgcggccagcgtgaacaaccccggcatcatcgaagccggcgtcgccgccgataacagccgcaacaccacgggcgacctggtggtgaacgcgcagaccgtcaccaccagcggcaaccttttggccagccgcgccctggcgatcactgccgcacaagcgctgaccaaccagggcgcgatcatccaggccaagaccgtcgaggtcagcagcgccaaactcaccaaccagggcgccagcgctcgcctgtttggcgagcagagcctggcgatcaactcgccggccatcgtcaacctcggcggcctgatccgcttcggcgaaggccaggctgctacgctcaacagcgcgtccctggacaaccgtcagggccgtatcgaaatggccggcggcagcctggtgctcaccagtgccgacctgaacaacagcggcgggcaagtcatcgccaacgacctgaccgtcaacgccggcaccctgaacaaccagaacggtgtattggtggccaaaaccgcgaccgtcactgccagcaacctcgacaacagcctcaagggcctgatccaggccgacggcggcgcgctcaacctcgccgtttccaacaccttcaacaacaatcagggtttcgcccaggccagcaccgatctgaacgttacggccggcaccctcagcagcaacgcaggcggcgtactgagcgccgacaccggcaagctcaccctcaccgccgcacaacagctcaacaacgcccagggccgcttgcaggccgggcagggcgatatcgaactgcacgccgccaacctggataaccagagcggcacaatcgtcggcaagcaactgctgctcgacgtggctggcggcgatatcgacaaccgcgccgggcgcgtgttgggcgaccacctcgacgtgcgcgcctcgggcctggacaaccgcaacgccggcctgctggccggtggtgcccagggcgtaagcctgctgctcaaaggccctggccagttgctcaacgcccagggccgcatccagagcgagggcctgctgcaactgcaaggcgagcgcttggacaacagcgccggcatcctgctggggcagaccgtcgacgtcaccgcgcagaccttcaacaacagcaacaaaggcgtgctggtcagcgatggcggtgatgtggtgctcaaggtcagcgacctgctcaccaacgtcggcggccagatcgacgcgggcgagcgcagcgtgctggtcaagcagctcaccaccctcaacaacgacggcggcaccctgcgcggcaagcgcctggacatcgccgcccagcacctgaacaacgacaacggccaactgctggccggcgccgaaggcctgagctccagcggccaggatgtgagtaaccgcaagggcctgatcctcagcggcggcgccctcaccgaactgaacaccacccgcctggataaccagggcggcaccgtgcagggcgatagcctgagcgtcaccgccaacagcgtcgacaacgccagcggcggcctgatggccagcctggtcggcaacctgcaactgaccgtagaagccctggccaaccgtggcggcaagctgttcggcaaagaacaagtgaccgtcagcggcgccagcctcgacaacagcgcgggcggccaggtcagcggcaatcagatcaacctgacctcccgcgacaccctcaccaaccagggcggcctgatcgaagccaaccagggcctgaccctcaccggcggcaacctggataacagcgccaacggccaactgcgtgccctgggcggcgccagcagcaagctcaacctcagcggcgcgttgaacaaccagaacggcaccctcgaattcggcagccaggccttcagccttgacgccgccagcctcaacaaccagaacggcatgctgcaacacgccggcaccggcctgttccacctcaacaccgccagcctcgaaggcagccagggcaatatccagggcatgggcagcgccgactgggcattcggcaaggtcgacggactgggccgcgtgcaacttaacgacgtgctcacctacaaaagcgaacaggcgctggtcctcaaggccggtgaccgcatggccagcgccaagggcttgatcctcaacgtggccagcctggacaacggcggcgaactgctcagcgacggcgacatcagcatcaccaccggcgatatcaccaacagcggccgcgtctcggccctgcaaacactcaccgtcgccgccaacaaccttagccagaacggcggccgcctggcagccaccaatacgcgcctgaccctgggcggcaccctggacaacctcgggttcctcaccgcccgccagcaactggacatcgccgccgcgcaaatcaacaaccgtggcactctcggtgcccagggcgcggtgaacctcaccgcagtcaacggcatcaccaatgccgccaacacgctgctgttcagcggcggcgacatgaccttgcgcagcaatggcttcagcaacagctatggcgatgtctacagcaaaggcaacctgagcttcgccgcccgcgatggcgggcgtgccgtgctgttcagcaaccgctccggcaccgtggaaagcgaaggctcgatcggcatcaatgcgggctttatcgaaaacgccaaagatgaattcgaactcgggcaaacactgaccaccggcagcttgagttggatctgtggccagcactgcggcgaaagcgacaactgggaacgtggcgagatcaccatctacgagacgtaccttgaggcggccaccaaggactcggtagcggcgcgcctggtggcgggcaaaaacatgctgctgcaaggcgacactgtgcagaaccgctacagcctgatggccgccaatggcgacctgagcatcactgccggtgacctgctcaaccagggcgccgccacgcgcacgggccagcgcaagcttgtcattggcacgccaggtcacgtctccgacgatttgtttgagcgcatgcaatatgtcgatgtgcccgcgttcaatgcggccacggcggccgggaatttcgacaaggcgcgcttcgaagaactcaaaagccgctcacccaatagcctgccgttcgcctacgcaagtgacgtcaccacctggaccaacaacagcggccccggttacgacgccaccctgcaagcgggcggcacggtcaacctcaacgtcgcccgcaccctgcaaaacggcacgctgcacaacaacaccctggcccagttgaccggcaccctcggcgacgatcaggccggcatccccgtcggcggcatcaacatcaacctgagcaaacacgccaacgacccgagcgcccaggcgcctggcagcgtattgcccgtggtaggcgtggcccctggtggcggcttcgtgcccgtggactacaccggcaccgccttcgccccggtcgatcccaccacctcgccgaccttccaactgcccaagggcgagtacggcctgttcgtcaaaaacgccgaccccaccagccactacctgatcgagaccaaccccgagttcacctcggtgtcgggcttcttcagctccgactacatgctcggcaaactcggtttcaccgccgacaacgcctggcgccgcctcggtgacggccagtacgaaacccgcctgatccgcgacgccgtcctcgcgcaaaccggccagcgcttcctcgccggcggcctgtacagcgacgccgaccagttccgctacctgatggacaacggccttgccagcaaagacgccctgcgcctgagcctgggtgtggccctcaccgaccagcaagtcggcgccctgacccacgacatcgtgtggatggaaaaccgcgtcatcgacggccagaccgtgctcgtgccagtgctgtacctggcccagaccgactcgcgcaatgtgcgcggcaacagcctcatccagggccgcgacctcaacctggtcaccggcggcgacctgatcaacgtcggcaccctgcgcgccagcaacaacctctccgccatcagcagcggcagtatctacaccggtggcctggtcgaagccggcaacaacctcaacctgctcgcccaagacagcatccgcaacgccatggccggcgaaatccgcggcaaacaagtcagcctcacggcgctcaaaggcgacatcaccaacgacaccaccgccatccaggtgcgtgacggcgccggcatgcgcaccctcaccgacaccagcgccggcaccatcgtcgcccgcgaaaacctcgccatcgacgccggccgcgacctcaccaaccgaggcgcactcaccgctggtaacgacgccaacttaaccgccggccgcgacctcaacctcatcgccgccagcgacacccgcgtcaaacacgagacccgcgacggcggcgagaaatccagcatcaccaccgacgtcaaaaacctcgccgccagcgtcacggcgggcggcaacctcaacatgcaggccgggcaagacgtcaacatcatcggcagcaatgccaccgccggcaaagacctcaacatcgccgccggccgcgacctcaacgtcgcctcggtcagcgacatgcacaacgtcgagggcaaggaaaaggacggcaaaaaacgcatcaagacctcggacgaccagactactcaagtggcaagcgtgctgacggcgggtggggattttgtcagccaggcggggcgtgataccacgattgtggcgagcaggatcagtgcggggaatgaggcttatctgtatagcggggataagttgagtttgttggcggctgagaacagtacgcatacgttgtatgacatgaaggagaagggaagctggggcgctaaaaaggcgcagatggatgaagtgacccgcaccacccaggtagggaccgagatcaagacaggtggcaacctagtccttaaaagcgacggcgaccagctgtatcaagttgcgaagcttaatagcggcaaggacatcatccttgatagcggtggtgcaattgtctttgaaggcgtcaaggacctgcacgatgagagccacactaagagcaaaagcgacctctcgtggttcagcgctaagggcaaaggtaatacagacgaaaccttgcgtcagagcgagttggttgcccaaggacagcttgtcatcaaggccgccgaaggcattcgtatcgacgtcaaacaggtcgatcagcagactgtaagccagaccgttgatgcgatggtcaaggctgatcctaatttggcctggctcaagcaagctgaggcacgtggcgacattgattggcgccaggtaaaggagattcacgagagcttcaagtacgacaactcagggttgggcgccggtgccaagattgcgattgcgatcatgatggcggcgatcatggggccggtaggattcgggttgcagggagccacccttgcggtgagcaccagcctgagtacgacggcagtcactagcaccatcaacaacaaaggcaatttgggtgcagcgcttaaggaaacggtcagcgccaatagcctgaaaagcgcagcagtcgccgggttcacggcgggggctcttgagtatgccgacaccaattggttcgctggtgctgacggtgcaggtgcaggtgcaggcacaagtacaagcacagtccaaggtgttaccccgagtacgggttcaaccttggcggttacgaactcctccaaagatattttcacctggacgtcagcaggcgatatcgcgctgcgtaccggtggccgggcggtaatctctagcggaatatcgacggccattcaagggggaagcttcggcgacaacttcaatgcggccctgttgggagaggctggcaacgttgcaatggctaccggttttaattgggtgggtgactacgtcacgttccccaatggcagccctcaaaagattattgcgcacgctttgatggggggattgctggctgaagccacaggtagcgatttcaaaaccggggctgccgctgccgggctgaatgaggcactcatcaatcagttggtgtgggctgctcaaggcaatgacgacatcacgctgatgctttcacagctgacaggcttgttagcagctgcggcggtcgatggagatttggaaaaaggctctcagattgctcagaaggcgacgacgttcaactatctttaccacgaagaagtcgaggaaatgcttcgggaggtagatagcaagactacggagcaagagaagcgtgaggtcaggcagcgctatgcggaacttgatcagcagagaaatgacgagttggatgcgctttgcgcacgcgatcctcaacgctgccgaggtattgccacttccctggcgaacgatgatcagaaacttgtcgatctggtaggtaagcttagatccgaaaagcagggtggcgctgcctccgctgtaggtttcgtgatagggaacaatctcgacgcttctagcaaaattgcagcagatatcagctccgcaggtggcggagcattggttaagctgggtgcagaggctataaaggctggagtcggagtagcattaccgtctcgctctgggggagggaaagggaaggctactcagggtgaaactgcgtctcctgaagtaccgttagtgtcaaaggaaatattaatatcccgggggaaatatggggaagcggcagagcatatttcagatgcgcaaaacgccggtcatcctgatgtattaacaattgataggcctggtgctcccgggaacagaaaggactcaattggtggtcttcctaaggtccctgggaaacagttagatgagtatccaccggcaatgtttaaagagggtgggactggagcgagtgttagacccataagcccgaaagataatatgggggctggcgcatgtataggtaatgcatgtcgcggactgcccgatggcgagaaagtcagaattaaggtggtggactaatggctaggtttagagaaagtatatatttgtcttattcgcaattttgcgtgtttttgagttcgcttgatcagccgtataatgattggagtgatcgtagttatgcgcaaggatttgcgtggaggttagggagtgtttcttttagagctttgattgacgaaggggaccatataattagccttttcattaacgaacaagtgcccgctataagcgcagacgtggttcgggcctttaaagttcccttcgcggtgagagatagaaatattgaggttggtagtatttcgagtacggttcctctagaactgcctgaaggagattattctcttcaggtcgaatttataagaccctcctcaagtggagtgtatgaaataaatgtccatttgaatttagggggctgcgattttgaggtgttgagagcagacgccgaaattgacgagcaaggtgagtttgatatcgatgcggttcctgcgggataaaatttcggagaaatgggggcggatttgaatggcacttacttaaccttcttcgggtgtccatttctcctgacctcggtcctagccgccgagcgcgtctgcatcagcatcgggtaaggcttgggccttcgttttatggcgcgaggctcaatccgtcccggccggtttccgacacgtttcctggcgatcaacctgagtaaattcggtaccccatcgtcttgttcgtcggcaccgtactgctgcatcgcgaggcataattggaagcgaaaaaggggacagatttatttaaatttgtactgggataagcgtattaaataaatctatccctttattctccgaaaatgaagctcgcagaatacaggagcataaataatgattaccaaagatatagaaattgttaaaagtatttttgaattgcttcagtcaggaattgttgaagattatgatgcattcaggtatgaagctgagttgtgcgatagatacatggttgaagaagtcaccattgagaaaaatggggtgggaaatgagcagccgcaaactgatttcaatggtgctgttttgtatcgattaattaaggagttgaaggctagcgcagcatcgcggggtgagaactggagttcttttgtgatgagttacgatgttggtgggcaagtaaagacgaatttcgtttatccgtgagtaaaagtgtgaaattaatgtttgagtgtgattgattgtccatttggtttgtgtcaaagagggttatataaaaggggtgggtttatttgtattaaataaatctgtcccctttattcgaaggaaatagtttggtatggattcaagattgatatcactctgtaaagagttggcgaaaatgacttctgatcaggcggcagcttggatattgagccggtacccgcttgcttcagataattggggtgaagctttattactccttcctcatagatcttggaaaaaaccagagcagaaacgtttagcggattattattttaagaaaattccgttctctagcgctagaggatatgaagcgttcgcgtcaattatgccagttaagttaatggttgcatgcattaacgatgcattgcccaaagatcctagcaggctcgagctattgttttatcatcttgtcccagtgcttaagcgttttgcaaagagtgatgcagatcgaaaaattattgagactttcctttcggctttttcgataaatttgccaaaaaataattgagaacaaaaggaggcggtttgtttgatctagctagagaagtgaaaaaagggagcagatttatttgagttagggttgaaaaaactattaaacaaatctgttcccttttattcgcccttttgttcgatagggcaatagatatcctgaatgagcaaaatatcagtagaaaaggggggccagggtcggttctcccggcataccctccaaaaaaaggagctgaataatgcattccgtaccgctagaacatgagaagcaaaagttgattttctacgtggctcaagacttagatcagtctattagatctaatgtgcagcagctcgtgaatgagctcgctgcgtcaagaatatggagcattgccccgccaacctttattgacgcgatagacgaagggggcgcggaagtggtgggtggaatgttggagatttattcagcactgcaaccgaatatactgtctgttgatatggattcaaaaaatctagatgaagtggaagaaatagtctgtgccgtaaaaaagttatcggaaaaggaaaatatttcctttgagtttcagttggatacaacttttgtcggcgccattgatgatggtgttgttgatcgagtcttgttggagggactgctcgtgccgtggcgaaatcatataaatggaaaaagttgagtcggtgccagagcggagatgaataaaaaagtgagaaaagggaaaggcttatttagaattagagttgaaaaacgtattaaataaatatgtcccatttttcacattttcacggagagaaaacgtgaaaaaaattagcgtaataatggtagttgtatttctgattgtgggttgcgcgccgtcacggtctgcgtgggtatccagtaaagatggatgggtaggtaccaccttttaatctcacgagaaaaggggacagatttatttaaattagagtttaaaggcgcattaaataaatctgtccccttttgcagtgatcctcatggtaagcagtactttagccccgcgactacttttgaaaagaatttttcaggttatgttgttgttccaaaggatgctctgaaatgaaattaagcattaagtttcccgagaatttgttaacccacagcctgctcgagcaaaggctgattccttgcatttgcaaaattgcaacggagtttgaaattgaatttttggaccctttgccagaagctgcaggaaccgttctggagtgggatcgtgcagaacttgaaaaaagagcgataggtggggtaggtgggcaatactctcactatgcacacggtcgggtgtcgttaaaaaaagttgatattgatatctaccaaatattggatcttgaaatgttttataggctttttggatggtgcagcatcttggaagatggtaactatgcgccgccggggcagttttgggatgatgaataagttgaagaaaaggggactgaagaaaagggacaagaaaagagggcagatttatctagactagagtttaaaggctgtctagtcctgaagcaggtgtaaacctatttcaggactagacagtccccttttttcgttgattcgtgacaaaaatattggaagggattaagtcagaagcagtaatcgtgggtagtgaagttaataaatggcttacgagggactgaaatgagatattacttaatgcgacaagatgtaactgtctgcgataggtgggtgctcggagatgtacatcatgtagataactggcatttcagtgatcctccagttaattttatggagccaggcacatataccctcgatgtaaggttcgacggtaaagaagttgattattccctcgctggatacgccagtattcctgttttaagcgagagggcaaaaaattcgctcgccggtttgccagagacagacgaactttatcagcatgtcgtttttgagccggtgaagataaacaataaagtggtttgccagagctattttttgatgattattgaaacgcaaattgattgcgtggatgaaaagcgctctcgctataaaaagtttgaggtagatgatcctgttaggccagatatggccggcaactatcgtgctttctacaatttggtggttgacccgggtaggggcggatcaagtcatatatttagacttaaaaaatatttgggtgcgatcatagtaagtgaagaagtgaaacggcgacttgtggcagctggtgttgtcggcgtactgtttgattctgttaatggtgatcaagaaaccgttacctagttagtcaggtagttgggggaaggcggcgaatttgtttaattcgtggtggtagtgcaaagaccattgattaaatctgcccccttttgttgtgtttaattacatgggggggcgatttgtgtcggacaaacaagtatatgagctaacgattgatgatcttgatcgctacagcgtttggttttttccgatggacgataccgtggaggatgagttaactgtacgccccctcgccgagcaggaaacgtgctcagactttcagattatcgttcgagctgatttttttggtgaaagacactctgtgtatcgcggctatttgtattggaactccaattccgcaattgaatgcttaaagcctgttgtattgtctgataagggagccgtcgtaaatttttggagcgatatagtaactcccgcgtgggaaagttcagagtttgccggttcgattagatccgagctgcctatttcttatgcctcggaatcggttttcggtcttccttccatttgcggaaagctggagggactttattatctttctgatgatcaggtgtgctgcgttaaatgacgcgagaaaaggggggtgatttatttaaatttgcgctgggatctattaaataaatctgtcccctttttgcgaggtttttcataatggtgcgcgtcacgtcgggtgggaatcgatgagtaaggggcaataaatgatcgctggagtaagttttgattcttattatggtcaaggtaatgctgctgacatagaagcttttgaagcattggcgggtatagtttttcctgcgaaatacaaagaagtttcagcgaaatttaatggcgcgtttattttaaataaacctgttttcaatttttacaatcgtcttctcggcgaagatgttacgagcagcgctggtatgtttttacctttcggtgaaatcgaaggctcattcgagacaatggaggtgaaataccgtcatccgccagaagattttgttcaaggcctaattattttctcagtattagggaacggagatgcgctctgttttgactatcgtaaagatcggctttctgatgatccagaagttatgatgtggcatcatgaagccgttccaggtagcgattcagaactatcatttgtcgcttcctcattttcaaaatttttagaccagttatttgagcggccgcccgaataataagaagtttcgaaggatctaatgggaggtggtgtcggacaaaatttaatttctaaggcgacatcggtatcagatgtccccttttgtttttggcatcatcaccaagatagcggacggatgcagctcgttccggagctgattcactgcaaaactggacccataggtggtgaaactatggggggcggaaagtgattatagaaaaaactgagcgttacagtgatgaacttttagggtttgtaattacctgtctgttctgcgaggctattgatatatcagagttacaatcgtggtgcgcaggatttttaggggcggagggagctccagattttttatatgatttgattgaatttgatgagcctattttcaagatctacaaagtaattggctatgttccaaaatggagtcactctaaaaacgaggaatatgctttgtatggaatagcactgctccgtggcacggtaccctccgatatgccgctttcggctgccgaaatgttggacgagctagcccggttgccagcgatacagcatatgtttcgtaaagtatttccaagtgttgtattttaaaaggtaggatagattttttggggtagagatgagggtgtgttagcaataatatggaaatgaaaaaaggggactgaaaaaaagggggaaaaatttatttaaaatagagttgaaaagcctattaaataaatctgtcccctttattagttgtgaaggttctttgtaaacgcttggtcatcaaggcggagcagtgcgaaagggcaggtttatttagcctttaccctccccgcacgaggccaaagcgggcgacacaaaggccgcccggttttcactcaggacggatcggcattaagcctgcgactgatgacatccagcaaatcacacccatcgcgcagcggaatggccagcaagtgggcgaagtctgaaagcactacggcatcgctgctgagttgttcgcggaaggccaggttttccagcagttgggtgacggcccgaatacggtgcacggcggcgtcgtgaaggacgtccagaggtgcctgggtgtcgatgatcagggctgggacggtgcagtcgtggccggttaggggcatgtatctattcatgggtacaacctcggtcagtaagtgaggctgtcacttgtcgtcgccaaacgaatgggtgacagctgtacgcaggttggcgaaccgggaccgagttccggcagacccgaaggtctcccgcgcacagctgccataaagcagcaatgcgggtacggaagcccctgcaagcaagcagaaagctttcgcatacggtcaacggatcgccaaatccgatcgccctgttgggcgacggccggactataagcccctcacccaaaaccgcgcaaggcatcacagcaatggcacaatgcttcgggccatgccataaaaatgagatcccgccatcatcggcactctcaaaaccgctccaccgttacccacaaggaagaaatacatgatcaagctgttctgcaaagccgctgtcgttctgtccctggccacgctgtttggctgttcctcgacgccgtcggtggagaagatgcaggctgacgtggcgaactattcgctgcccaaggctgccgtggctgataaaggcctggtgtacgtcgtgcgcccgagcaacgtaggaatgttggtgcggttcaacgtgttcctggatgacaaggaagccgactcggagatgggttacaaccgtggtaaccagtacatctattttttcgtgacgccgggcaaacacgtgatcagctccaaggctgaaaactgggcggacatgccgattgatgtcaaagcgggtgaggtggtttacctcaagcaggaagtcgaaatgggcttcgccgtggcgcgtaacagcctcaaagcgctgagcgaagttgaaggccgttatctggtcaaggatgcgtccttgggcaccattgccaaagaaagcaaatgagttgagccagtgtgtcggcagggtccaggccttgccgacttctcgtattcactgcaagcattaaaggattgatgtgaaaaacctcctcctcattctcctcaccaccctcatcctcggcggctgcgtcagccaccccctcactcccgaaaaccgcgcgcagatcaagaccgtcaaagtcctgcccgtgaagtgggaaaagaacatggtgtacttcggccgcgaacaggcctggggcgcggccctgggtgccggggttggcgccggtgttggcatggccagcggggcgtccaagctgggtactgcggcgttgagcggtgccgggtttgccggcggcatgaagcttgggcagttggccgagatgccgacgccggtggctattctgacggtgatggaggcggaaaaactcgatgtaggcgtgttgctcaagcagggctttgtcgatgagttgggtaagacgtcgacgctcaaggtggtcggcgacgatgagccggctgatgcgcagattcagctgaccgtgtccgagtggggctttcgcctgacccagggtttcagcagtgtgatttatccgacccttaacgtgttagcgcagatggatcgcggcgatgagatgatctggcgcacctttgaagcggtcacgccgttcaatggtcagaatgtctatggctacacgccgctcacttaccgcaccgaccctgaagctttgcgccgggcgttgaccgggattacgcagatttctgcgcagtatctggtgaaggagctcaagtagggatgtgcgaaggctggctgttgttggtgtaatgccagtcagttaaggatttttttgtaggagcgagcttgctcgcgaaaaacgtcaacgataacgcgtgctttctgaatnnnnnnnnnnnnnnnnnnnnnnnnnnnnnnnnnnnnnnnnaagttcgataaccgctccagctacatgcgcggcatcttctccgatggcgttgaccgtctcggcggccaggccaagacgatcctgatcacccacttgcagcagaccaatcgcttcagcgtgctggaccgcgacaacatgggcgagatctcccaggaagccaaaatcaaaggcaccgtgcagaagctcaagggcgctgactatgtggtaactggcgatgtgaccgagttcggccgcaaagaaaccggcgaccgccagttgttcggcattctcggccgtggcaagacccaagtggcctacgccaaagtcgcgttgaatatcgtcaacatcaatacctccgaagtggtgtattccacccagggtgccggtgagtacgcgctgtccaaccgtgaagtgatcggcttcggcggcaccgctagctatgactccaccctcaatggcaaggtgctggacctggccatgcgcgaagcgatcaaccgcctggtcgacggcatcaacgccggcgcctggaacccgcgtaactgatcagccacaccacaaggagcagtacacggatgagcaaggcagtgaaattggcgctgacgctggcagcagtcgcgacggtagccgggtgccagacggcgccccagcccctgtatcaatgggagagctaccagccgcaggtttacgagtacttcaagggcgagcccaaggaagcgcaggtggaagcactggagcgcgatctgcagaagatcaacgccagtggccgcaaggcgccgccgggttaccacgcgcacctgggcatgctgtacatgaacatgggcaaggatgaccagatggtgcaggagtttcgcaccgagaaggcgctgttccccgagtctgctgcgtacatggactttctgttgaaaaacgccaaagccggagtcgccactaaatgagcctgttaaaactcaccggcgccttgctggccctggcgttgctcggcggttgcgccgcgcccaagacggttgattattcggcgtacaaacaggcgcggcccaagtcgatcctggtactgccgccgatcaatgaatcgccggaagtgcaggcgtcttacagcctggtgtcgcaagtcacctacccgctggccgaagccggctactacgtgttgccgattgccctggtggacgaaactttccgccagaacggcctcaccaccgccaacgatgtccaggccgtacaaccggccaagctgcatgacatctttggtgcggacgcggcgctgtacatcaccatcagcgagtacggcacccagtacatgctgatctccagcgacacctcagtgacggcctcggccaaactggtggacctgcgcactggcaccaccttgtggaccggttctgcgcgggcgtcgagcgaggagggcaacaacaacggtggcggcctggtgggcatgttgatcacggcggcggtcaagcaggtgatcaacagctctaccgatgcggcgcacccgattgccggtatcaccagtgcgcggttgctgtcggcggggcaacgcaccggcatcttgtacggcccgcgtaacccgaaatacggcacggactaagagaacaccgccattcaactgtgggagctggcttgcctgcgattgcggtgggccagtgctgcagagattgcctgatacaccgctatcgcaggcaagccagctcccacattgatcggggtgagtctcaagggtttaacccgaacccaacctatgtcgcgtctgaccttgtgaacggctcattcattcacgaggttcagccccatgtcccgccctctgctttacctgcgtcccgctgcccaaggcttcaccgttaccctgctggtagcgctggccgggtgtgggctgtcttcctctcccgaggtggccaaaccggcacaacccaccgccgagttgcacagcgcgccagttgagggcgcgatggccaaacgcatggccatgccggcaccgatggcggtgcgtgaaatggcgatgattaatgaccgcagcgaaccccgcgagcaatacgccaacctgcccgataaccccgtgcaccgcgtcgccgaaactccggtctccaccttcagcgtggatgtcgacacgggcagctacgccaacgtacggcgcttcctcaaccaaggccgtctaccgcccgaaggcgcggtgcgattggaggaaatggtcaactactttccctacaattacgcgctgcccaccgatggttcgccctttggcgtcaccaccgaagtcgccaccacgccatggaacccgcgcacaaaactgctgcgcatcggcatcaaggcctccgataaacccgtggccgaactggcgcccgccaacctggtgttcctggtggacgtgtccggctccatggaccgccgcgaaggcttgccgctggtcaaaagcacgctgaaattactggtggatcaactgcgtgatcaggaccgcgtatcactggtggtctacgccggtgaatcccgcgtggtgctcaagcccacctcgggcagtgaaaaagccaagatccgcaacgctatcgagcaactcaccgccggcggctccaccgcaggcgcgtccggcatcgaactggcctaccagatggcccgcgaaggctttatcgaccagggcatcaaccgcatactgctggccaccgacggcgacttcaacgtgggcatcagcgacttcgacagcctcaagcaaatggccgtggcccagcgcaaaagcggcgtatcgctgaccaccctcggctttggtgtggataactacaacgagcatctgatggaacaactggccgacgcgggcgacggcaactacgcctacatcgacaacctgcgtgaagcgcgcaaggtgctggtagagcaactcagttccaccctggccgtggtggcgcgagatgtgaaactgcaggtggagttcaacccggcccaggtcagcgaataccgcctgctgggctatgaaaaccgcgccctgaagcgtgaagatttcaacaacgacaaagtcgatgccggcgagattggcgcagggcacacggtgaccgcgctgtatgaaatcgtacccaagggcgagaagggctggttggagcctctgcgttacgccgccgcgcctgcgaccgaaggcaaatccgatgagctggcgatgctacgggtgcgctacaaacccgctgcgggcggtaacagccagttgatcgaacgccccatcgccaaccaggccaccccggccagcgatgacctgcgtttcgccgctgccgtggccgccttcgcccaacagctcaagggcgatggccgctacactggcaccatgagtgtgcaagacaccgccagattggcacgctcggcccggggcgatgaccccttcgggctgcgcaacgaattcgtgcaactggtggagctggcccaaagcctcaaaccctgatctcgctcacaaccgagatcaaatgtgggagagggcttgctgctaaagctttttgtaggagcgagcttgctcgcgaaaaactcacaggcaccgcgtttatccaggaagcacgcgttatcgttgacgttcttcgcgagcaagctcgctcctacagtaatttgtttcggctgacaaaaaggagttcgcccattacatggccgttccagatgactcacccagcgacgaatcgctgctggcccgctaccgaaccggtgacgctgccgccttcgaagccttgtacagccgccaccgccagggcctctaccgcttcctcgtgtccctgtgcaacaaagccgaactggccgaagaaatctaccaggacacctggctcagcctgatccgcagcaccacccagccacaaggccgggcgagttttcgcacctggttgttccagatcgcccgcaaccgcctgatcgaccattggcgcaagcacggcatccacaaccccctgcatgacagctacgatgaacagctgcacgcccaggccgacgacagcgacggccccgagcagcaactgaccctcagccgcgaccaggcgcgcctcgacgcggccctgcaagagctgcccgaagaccagcgcgaagtgtttctgctgcgcctgcacggcgagctcgaagtaccgcaaatcgccaccctcaccggcgccccgctggaaaccgtaaaaagccgcttgcgctacgccctgcaaaaaatgcggcgcctgctggccgaggaggtacctgtatgactgactcccgacacaccccagacgacgcgctgctccagcactaccgtcaacacagcacgggcgaaccgcccgcgtccctcgacgccttcatcctcagcgctgcccgccgcgaagcccccaagcccgcgcccaacctgtggcagcgttggctgcgtgcatgccagcaaccgcgctggcaaatggcattcgctagcctggccggtgtggcgttgctggtgggcgtgatcacgcgcacccccgagttggacccggtacacaacacacgtctcgctgccccggccgcgttctccgcgcctgcgccgatgagcgcgccgccccgtgccgagtcctacagtgccgaaatgagcagcgatgccttgccccaaggcaagctggccaagcgcgctgcgccgcaacctcttgagcttggcttgcaggaagtagcgcgcctgcgcgcggcaggggatgaggccgcggcgacggccaaacttgccgagttgcaaaagcgcttccctgggcaaaacctggaagaacgccttaaaagcttgccgccgcactgaccccgtggcgatggtatcgcgcgataccatcgccggcttggcggcaacgggtcataagcatatgaatttatattcagttgcagggggagtaattgctgctagtttaatcagcgaaagacgtcattgttcctgctggccaacagagcgggtcatgttttcattggatgaaaagttgcaagcggacttcaaggattaaagtcttctcagcattcgctacatggccactgggaaatagctctacctgttggaagtccattcaattggattaatgaacggtacctgatatgacggcgacgctgaattactcacttgcacaggcaatacctgaactgcaacaacccttggatatattcgagctgaaagagtccaatgtacgctcttattgccgggactttaccgatacgttcaaaaccgccgagggatcaacgctgaccagtgagcaaggtcagcttttcatcgactttttcagcggtgccggtgccttgaactacgggcataacaacccggtattaaaggccgcgctgctcgactacattgcgcacaatggcatcactcatggcctggacttcaagaccaccgccaagaaagcctttctcactgcattcgaagcgcaggtgctcgcgccgcgcaacctgcgttacaaagtgcagtttcctgggcccaccggcaccaatgcggtagaggccgcgatcaagctggcgcgcaagtacaccgggcgccagaacatcgtagccttcaccaatgccttccatggaatgtccctgggcagcctggccctgaccagcaacccgcgtaagcgggccggggcgggcgttaccctcagcaatgtcaccttcatgccctacgatggctacttcggcgacgaggtggacacctcgctgtacttggccactatgttgcgcagcggcagtggcatcgacaaaccagcggccatcgtgctggaaaccgtgcaaggcgagggcggcgtcaacagcgcctcggctgcctgggtgcaagccgtgcagcgcatcgcccaggcccatgacattctgctgatcatcgatgacatccaggcgggctgcgggcgcacgggtgacttcttcagcttcgaagccctgggcgtcaccccggacatcgtgaccttgtccaagtccatcagtggctatggcttgcccatgtcgctggtattgctggcgcctcacctggacgtgtgggagccgggagagcacaacggcacgtttcgcggtaacaacctggcgttcgttaccggcaaggcggtaatcgaccactattggagcgacgcaggctttacccgggcgctcaaggccaaggcaggcgtgctgcatgaggccttgcagggcttgtccgcaggcttcgccgccaaggcgcccaaccgcctgaagggccgtggttttttcagaggcatcgagttcgaagacgtgagcctggcgcagaaagtcgctgcgcgtgcctacgcccacgggctgatcattgaaacctcgggcattgataaccaagtgctgaagtttcttccggccctgaccatcacggctgcgcagatcgcccaaggcgtgcagattctggagcaggcgtttgccgaggtgaccacaccatgagcgatgcagtttttactcggcatgcgtccctcgatgacgccgccgccatcgcgccgttgttggacaaataccgcgagttttatggtgaggcatccgacctgacccgctcgacggcctttattcaacaacgcttctatttaggcgagtcaattattatcgtcgcgctggtaaacaatgaaatcattgggtttacacaactgttcccgagtttttccagtgtcacgttagagcgcctgtggatacttaatgatttatatgttgaggcgtccaaacgcagggcgggggttggcctggccttattgaatgcggccaagatgttcgcggaaacaaccggcgccaaacagttgttcattgagggcgcggacgataacccaaaggctcgaaacttatacacgcgcttcgggtttatcgaaaacacggcgtatcactattaccatcttccactgaagccaatccagggataggagcttttccatgtcagacactgttttcgatatcgtaggtattggttttggtccctccaacctggcgttggctatcgggctgcaagagtcggcttcagcgctgacctatcggttcctcgacgccaagcccacccccgactggcaggatgaaatgctgctcagcggctcggacatccagaacaaccccttgcgcgacctggtcacgccgcgcaacccgcgcagccactatgggttcgtcaattacctgaaagaaaccgggcgcctgttcgattacctcaatctgccgctgacatacccgttgcggcgtgaatatgccgagtacatcaaatgggtggccgggcattttctcgccagtgttgaatcctcagcgttcgcccaccgggtcgagccgttgctattcaaaggcgagcaggtgtggaaggtgacctataacgaccaaagggtcatctacgggcgcagtctggtgctgggcaccgggcgcacggcgaatataccagcggtgttcgagggcctgaccggccctcgggtgttccatctcaatcactacctggagcgtctcaaccagctaccccagagcgtgcagcgcatcggggtggtggggtccagccagagcgccgtggagattgtgctcgacctgaccgccaggttcccggacaaagagatttactcgctgcaccgcagcttcagcttccgcctcaaagacaccagcccattcagcgacaaggtgtattttccggaatttatcgactactacttcaacctgccgcccgaggccaaggcgcgggtggacaagcaactgcgcggcaccaactacagctcggccgatgaagacgtgatcaacgcgctatacgtgcgcatccatgaggaaaaactgcagggcaaacagcgtatccacattctcaacaacatcgccatcgagcaggcgcagatcaacgcatcagggcaggtggagctggcgctcaaagaggtcaaccaactgacccactcgaccctcgcgttggatgcgctggtgctggctaccggtttcaaggacattgccgccaaggaaaatggtgaactctatccaccgctgttggcgccttatcacgcccggttccgagcggacactcatggcgcgctggtggtgaaccgcgattacagcctgacggcgctggatgaattgcctgccgtgttccttaacggcttatgcgaaagctcccatggcctgggtgacgccggctcattcagcctgatttcactgcgggtcgaacatatcctcgcgtccctggaggcaaagctcgcgcaggccgaggctccgttgcacgcactggcctgatcggctctcggcagcggcctgcgcggtccgctgcctcatacaaggagttcccatgtttacagcagcattgatctacatcctggcggtgataagcccgggccccaacttcatcattgtcagccgcttcgcctcgctgggctcggtgtcgaccggcatcggcgcgaccctgggcatctgcacggtcggggtgtttttctcgacgatttcgttgctgggcctggcggctttgttgcaccagtacccggcgttttccaaagtcgccacgttatgcggttcggcgtacctgctgtacatcgcgtacagcatcatcaaaagcgtgctggccaagaacaccggcacggccgaaagcaccgcaccgggcgcgaccagcttcgccaaggcctaccgcgtgggggtgatcaccaatatcagcaacatgaaaaccatcgctttcatgatcagtatctatgccggctttctctcggttccgcgctcggagatcgacaaagtgctggtggtgatgctgtgctcgaccctggaagtcatctggtattcagtggtggcgctgctgttcggccaaggtccgatcaaggcgctgttcctcaagtacacccggcagatcgacgtcgggctggccgtatttctggtggcgttctcactgaacaacgccattcctgtgctgatcgccagtcgatgaggttgggtcatggaatggaacgcgttgctcaaggatgtgggggtgcgcttcaagcatcgtagttggttgttgattgacctgaagccggaggcgttggtgctaagcgattcaacgggggaactgacgagggattatccgggggtgacgttgattttggactgctgccttgagggcattttccaagtgatcgacagctttgggccgggtatcaattacgcagcatcactgcaggctgttcggcgcagggcttactccgtgccggtcgcgttagccagggaggtggcttttcaagatttcaaatgggcgtgctgaaggcccatataaatagccccaggtcgttggcctggggctttcttataacccgccgtgagcccggtaccaggccaccgtgtccgtgagggtctgctccagcacacgaaagctcagccccagttcctcttcacttttgcggtggtcaaagcgggtacggtgttcctcgcgtatcaacagccgtaacgtcgccatgctcagcaaaatgggcttgccggtcaggtacgcgtaggtctcttgcacagctgccaacaggtacagcgcgggcagcggcagttggcgggagggtaccttgaccccggcaatacgccccagcgccggaatcagctggcgcatggtcaagttgcgaccggccgcgagataacgctcgccccgacgcccgcgctgggcggcagcaatgtgcgcccaggccacatcgcgggcatcgaccagcgaaaaggtgccaggaatcagccccggcaacttgccgttgatcacgtccctcaccaactgccccgaagacgtcggcccaaggtcacccggcccccacatccaaccgggcaagaccatgcaggcgtacatctgcggatggctttcaagaaacctcaacacctcccgctcagccaggatcttgctgcggtagtagtcgtccgcatcggcttcggcccgcaggcacgtctcgtcgatcggcgtaccgggggcaccgtcaagcacggcaatcgacgaggtatgcacaaaccgtcgcacaccggcgtcatacgcccgttgcagcagggctcgcgtaccgacgacattgatcttttccagctcctcccaatggctgccgcccttgtagttatcgcgaaaaaacgccgcgcagtgaaacaccgtatggcagccttgcaacgccgccgcgaaggcatccacatctgccatgtctcccaccacctgctccacgcccggcacatcgccgaactgctgcgcacccttgaccgccgagcgcaccagcgccttcaccgcataaccccgtgcgaccagctcccgtaccaggttattgcccagcaagccggtggcaccggtcacaaaggtgctgtgcaagcgattggggttcgtgttcatacaggccattccatttgttgagaaggccagtagatatacccgcgagcccgcgccgtaaaaacagcgcctgcggcataatggctttgcacatctgcacaccagggaagcgcggagatatggcattgcaggcaaattgggacgatcttcgactgctgctggcagtctcacggcgcggcagctttttacaggcaggccagttactcggtatcgcggcctctaccgtctcccgccgcctcacccaactggaaaccgccctgggcgaaccactggtggaacgcggcgtggaaggctgccggctcacctcccgaggccaagccctggtagacgtcgccctggcagccgaatccggcctgcgccgccaggcgcccgtcgacggcacgcccgcaaccctcagcggcaccgtgctggtgagcgccggcgaaggcttttccgccagtgtgctcgaagccgccagccgcttcacagcgcagcacccaggctgctccgtagaactcctggtcaccaccgacttccacaaaatcatacgaggtgtggccgacattgccatacgcaccgcacacctgggcgaaccttccctgatctaccgagggcttggcaaactcgcctacggcgtgttcgcaaccgccgaatacctgcaacggtttcctgcgctaacgccagccaccgccgccagtatcgccttgctgccaccgctggacctgctaccgcaaatgcgcgccgcgaaagctgccgggctggaccatgcgccgattagggtgagttcgttcgcggtgcagcttgagtcggtgaggcgcgggatgggggtggcggtgttgccgcgtattttggcgacggggttgagtgaggtttttccggagatagaactgccggcgatggaggtttatttggtgacgcggccacaggcgttgaagcaggggcatattcaggggttttttggggtgttggagggggtgttgcgcggtgaaatttcaagcctggaaaagcagcattccgggaattcatcaaggccttcgtaatattcaacccatcgggatgtaggcgcttagccactcgtagcaacattgagttgcgcgtgcaagtggctcacaaaaaagccctgggtcttaaggcctcgggtgtttcattcatatctggctccacacttctgcggcgatggtgctggcgtcctttgacatttccaacacaccaatgcgttcttgccattcctcgaatttgacaggtagaaaggacgcatttgtaatgcgcagcgcagcttcggtgatatacctctaaggcattaactgcatctccgacaaaccgtattcccccaacgaatacagcaacgtcccataccccagctggacgtagccagccctgtcagcaccgtaatccccgccaccaccttccacttggccgttatttgccatggcctgcacattcggtgcgctgaggccctttcgcacggcgtagtggttgtagagcagttcccatatcggacgggtttcgccgcgatgatcggccgagatgacggtctgtttgaagctgctgttggggatgggggtaaacggcacctcctggccaaggttgtacttggccacatactcggcgccctgcagcacgcggttgttctggtagccgaacaggtcgttgccctggctccaggccatttggcagaaactgccaagcagggctatgtcgagcatggcgtgtgactgatcacgtccgctttcctggacttgaccaaggccatcgccgtagagcttccacaccgcgtgggcgatggcgccgttaccggtgccgtgcttgaagtagtcgacggcctcgttgtagagatcgcggcggtcggtcagtacgccgatggccagcatcgagttcatgttggctaggtcccagctggccccatgatgatcaggccgggcgccgtcgtggttcaccaggaagtcatgattgatggggtagaacacagtgagcatcatgccttgaaaacgctggaaatcttccgcccgccactttgggtagctgcgcagcagttcggccgcgttggccagttggtagccgtacaagcctgccaccaaagctctgccgggcttgtctttgatcgcggtgagggtcaaggcccactggttcaaaatactcacggccttgtcggcatacgccgggttgttggagatctgccagcgcagggccagtgcatacgcggcggctgcgtcgttgaacagaacattgtcgttattcgggccgcctgaagtggggtacaccaccggcaccgggttgggctgccaggctaatgaggcatgggggttggcgatcagcttctgccagccggccagccacggctggttatagttggccagcttctcgcgtatccgcgtgaagtcctcccgggtctggagcaggccaggatgcacgaacgcttcggtatgcagggtgggggaggcttgactgccgatactcatcaatagcgcatagagcagcacggctcttttggacaggtacttcaaacggatcatcgtgtgtacgccctgatggggagaaccttgcgcggtctgaaaagccattcgcacaggactggaatctgccccagggatagttcagatgaagcctgcatacccggggcttgttgtcagaacgtgtagttgattgcaaacaggcccaagcctgcggtttcgcgccttaccagcgggctgtcgctggcctggtcagcgtattgagtcagcgtcaggctggccagcgttgaccagtgcgcgtcgaaggtgtgctgccagttcaaggcagcggagtaggcatagatcccggcgtcggcggtgtacttgctgtagatcgagcgttggctctgagcctgggtgacgccgaagaacgtctggttgtagcggctatcgccggcatgggcgtcgatggccaggctcagggtgtcgcggtctgtgtgcaacaagatgccttccaggccaaagcggtaacggttgcctcggtgctcgccggccatgcgcagttcggcttcgccgttgaccgacagccagtcaagcagttgttggctgagggtaaagtcggcgacggttgcgccgttgatatcgcccatacctctgagctcgtcgccgcccgggctggtgatgctgtccttctctttgcggcccaggtcgtaattgatcgctgcgctggcgccgaagccactgtcggattgaaattgcaggcccacgccgcgagtggtgtcggcgaacaacgctccgtgctggatgctgagcatcggcagtacgagcggacggtagcggtcagcacccatgtagcgaggcgtgacacccatgccaaggcccagggtaacggtggtttcttcggctgtcgggctggcgtcggtcgcctgagcctggggcgcgagcgcgcagcacagcagcgtgacggcgccccacagaacgttgtgggtaggggaggtggtgaagttcatggtcaagccctatgtgcaaaagaagacaacagtgcgcccgccgacgcgcgacacaacgcctccctctgatcgagctgttcaggcccgttgataggcttggacagcgatgcagtggtcggcataggatcggctcgcgaaagcgggcgtagggcaatactggcagcgcactttcaataaaccgttcgtaaattatcaaggtttcatcaagaggcttctttgtgtcaggaaaacgtatcctcatcgtcgaagacgacgccgacagcgccaacattctcgaagcctacttgctccgcgatggctatgaggtggccctggccgaagacggccagcgcggtctggacctgtacaaaagctggcagcccgacctgatcctgctcgacgtgatgcttccgcgcttgagcggcaccgaggtgttatccgccgtgcgccgtagcagtgacacgccggtcatcatggtcacggccatgggcgacgaaccggaaaagctcggtgccttgcgttatggcgcggacgactatgtggtcaagccttacagcccgcgcgaagtggtggcgcgggtgcacgcggtgttgcggcgcaccaccggcaaccaaccggtcgaacacctgctgcgccatgaaaacctgcgggtggatcttgttgcgtttaccgcggccattgagcagggcgaagcaccaccgcaatggctggacctgaccccaacggaatttaagctgctggtgacgttgctcaagacgccgtccaaggccttcactcgtgatgagttgctggaaatctgcctaccggaaagcgaagccctggcccgcgtcgtcgacacccacgtgcacaacctgcgccgcaagctggaaaaccacggcatcaccggcgttctggtcacggtgcgctccattggctatcgattcaggtaacgcacatgcttgagcaaccgcgggtcaacgacaaacccatgtggcgctggatcggcctgcgcatgagcctgctggcgatcggcgcggtggtggtgatctcggtgtgcatgtggatcaacgtcacactgtcggactggtattttgtgcagcatctgccgcctgggccgcgtgaggagctgctggcgttgcgcgccgagccagagctcaatgaggcacgcttgcgtcaagtggttgcccagtactatccgctggactatttccagccggctatcgccaatcgcgactggctgatactgatcggcctggtgctggccgcgatccctatcatcattggcttcggcctgtggttttcgcggcccttgtccagccagttctcggcaattgcccagggcgcccggcgagtcgccggcggtgatttcctgactcgcctgccggtgcaccgcgacgcgcccgacgagctgcaacggctggtcagcgacttcaacagcatgaccacgcaactggagcgctatgagcgcgatgtgcgtgaatccagcgcggtcattgcccacgaactgcgcacacccttgaacgccgccatggggcgcgtgcagggtatgctcgatgaggtattccccagcgatgccatgcagttgggcatggtcaagcgtcagctcgatcaactcagaaagctggtggatgacttgcacctgttgtcgatggctcgtgctggccggctggtgctggagcgcagcgagttttctctggcagctctggtggcggagcggttggcgtggttccagccgcagttggatgaggcttgcgtgctgacgcaggtcagtattgctgatgggcttcgtatgcatgccgatcgtgatcgcctgggccaggtgatcaacattctggtcgataacttgctgcgttatgcggccgggggaggcgagttgaatgtaacggcgcgccgggttcacggttcggtggtgattgaagtcggtgaccgagggccaggtatcgaagcccagcatctggacagcgtgttcgaccgcttctggcgtgcagagcgctccagggcacgttactcgggggggagcgggctaggcttgtccatcgcccgtgcgatctgccaggcccatggcggtaccattactgcccgcaatctggccgaaggcggtacgctgatcagggcggaggttcctgtgtaggcgtttcttctttgcttgagaccggcgctcaagacggtgaaatcgtaatgatcgtagagctggaaaactgcttgggaaaaaggggatttattttcacctctcctatcccgacgcgactcaacactctctcaccacccaccaaacgcacaaaaaagccccagatctcccgacctgaggctttttcatttcatatctggtgcacccggcgggattcgaacccacgacccctgccttcggagggcagtactctatccagctgagctacggatgcttgtgcgggcgacatcatacccatgtcgacctgatgcgtccattccggcatttgccccgccccctgtcgtccatttccgacaaaaatggctaatcgccaccctcattcacaactccccgcgccgcacgtccctttgtttgctttgctcttgtggctttaaccccgcttccacgccgcaattcctcaggtgaacgcatgcattccaaaggaaccgtgatgctcgatctcccgctcagacaaaccctgctggctcgctccgatttgtttcgaggtatgccggagcatctcttgcgctacgtggccacccatatggtggagcgcacgctggatgatcgtgagctgttgtatttcaaggatgacaccctcgaattcattgcgttggtggtggagggccggatttattcgatggtgcatgggccggatgggcgcgagcagattatcggcagtaccggggctgggcaggtggtgggggagacggcgttgatcaaggatcatgggcgcgagtcttccacttttgccagcgggcccacgcgattgttgcagttgggtagccggcattttgctgtgttgtttgaggagccggtgtttctgcggcgtttgttgatgctgatgatgctgcggttgctgcacgtcatcgagttgttggagttggtgtgcctgcatcggctggagtcgcggttggcgcggtttttgttggccaacctgggcgagatcgacctggcgttggctttgcccagtgtgtcgttgcccgcaagccagggggtgttggcgtcgatgctgaataccagtcgccccaagttgaatgtgcaactgcaagtatggcggcgcagtggggtgatcagcggcgatctggagcgcatggtgatcaatgatgttgagcatttgaggcgcaaggcttttgcgctgaattagttgtggcggtgttccccaggtaacagcgtacccccgtcgagccctcgcagactggcccttcatcaaggatgcacaggagtgctggcgatggggatgactgttcagttcaaggatcaatgggccgccgatgaccgtttgttcgaagcgagttggcgtgctgtgcacggcgagctcaggcgccgggcgttgcggcgggccaagggcaatctggatcagggccaggagtggttggcggccacggcgatcaaggccctgttgttttttcggcgctcgcccgagcgcattcgtgaccctcagggttttctgtttttagtgctcgatcatgtgtttctcgacagcgtgcggcgcagtaagcgcgaggggcggttgttcgatgattcggtggaccttgagcacgatcacctggccgcgctcgccgcgccctgcgcttcggtgctggagcgggtggagtgttatgagcgcctggagcagctcgaggcgcacgtcgcacggttaccgctgttgcagcagcgcttgttcgagatgcgttttgtcgacgacctgccttacccgcaaatcgccgccgagttgcacgtgaagctgccgctggtgcgcaagcgtgtgcaactgctgcgcgatgcgttgcgctgaaggtaattcacacatgctggcgtggggcgttctagtggtaagagcgcagcatgccgccgctatccacacccaaacctgggtgaatgccatcaaggagagatgtatgacagaggtcaacagccagatcaccgacgcggtcactcaaaccaacgtcaaggtggtggccgaggcgccagcccaggccatcgcgtcgctgtaccaggtggccagcagcgcggcgggcctgtcgttgcagaacgcggtcaacagccagcaggcgatgaatcagatttccaacgcggtgatctccaaggccgtggcgctgatcatgcagattggcgagaagggctgagccctcgggagattgattatgtcgtggttcagtcgcaagaaacccgccgcctcccaagcaacgcccgccgccgacccaccggcgcccgccgcaccggcctcgcgctcgatcatggcgcgcatgaacgagcacttgctcaatcaggtgagtgcgccgtcatccgacagcacggcggcgctcaatagccagattgtgcaggcggtgcagttcaccaattcgcagaactttgcctatgcgccggcgcagatcgcggtgccggccgacatgatgatcagccaggcggccgggctggtggcgcaagcggcggcggggtacttcgacggggtcagcaagatcgcgttggcggcccaggccgtactgctccagcaaatgaccgagaacatcgtcaaggacaacctgccagccgctgccgaagacgccttgggcgccctggccaccgacctgctggtgggcgccgctgccgctgtggctgctgctgccggtgcgatggaggccgaagccgccagcgtggccatcgacaagatcgaccagagcatcgccaagtacgcgagcaccctggccaaccgggccgcgccagcggcctgaacccagcacagcgctccagcgttctgctggggcggtgcaacagcaacttgaaagcaacttttcttgagtgaggagcgacatcatgcagcctggagatattattttttctgtcaaacaagatgacgacagcgcaacgcgggcgtttatcaaagccggtcaactggtcaaggccaaggtgttctcgcaggacacgacgtacctgaatgtggttcacccggcgatcgcagtgagcgacaccatggtgatcgaaagtgtcggcagcggcctggccctgaccgacctgagcctggaaaagccgccgcgttcggcgatggtgttttcctgcgtggataccgagttgggcgaggcggcgacggtggctgccaaacagttctatttcgacaagatcggcggtgacatccggggccgttatagcgtgtggaacgcgatgatctcagcctttcggcgctggacttccgataccagcctggtgacgcggatcaacgagtctatcgacattggcagcgggtcgttttgttcgcaattcgcggccaactgctatgaagtcggcaacctctataacgaggccaacctgctaccgcctccgcctgccattttccccaaccagcccagcgccataacgcctgcggagttggcgaccttctgtgattcttcgccacacttttactttgcaggtttctggcaggacaacgttgaggtgcggctttagcgggcgtgtcgcggccaaggcatctcccaaggaggtcgatatgcaaccctcggttctgtccaccgatgaccgccagcggctcgaagcgatgctgcgcaacccgcagattttcgccggaacgccccaggccatcgtcgacgaaaccctcaagcgcgccacccaggtgcttgagcaatcgaaggccaacgaacaagcgctcaagaccgctgcccagcaacgtgaagcggccctgcgccaggtgttggacggcgcagctcccgaccaggacgcgcaacgcaaggaagtacaggcactgatccaagggttgatcgcccagattgaagcggcgctgggccccgcagcgaaaccctaaaccaggtttcacagcgcctgtttcgcaacgttcattgatgaacacggaatgcaccgtgtactaaataaggaaattgatcatgccattagtcaacgagcaaattaccgacgcggtcacccagaccaacgtcaaagtggtggccgaatcgccagcgatggcgatgagcactatttatcaatccatggcgcaggccacggcgattctgttccagaacgcggtgtcggcccagcagcagcaaaacaccctggcccaggcggccaccaaccagggcgtgatgcagatctacagcgtcgataccaccgcaggtgcggcggccaccgagaaagtcgcccagggcggcgtgtcggataacctcaccagcctgttgaccgtgctcaagtctttccagccttaagcactgagcaataacggatgttgttctttctcaacccaggagtttcaaccatgagtacagtcagcccgcaaatcaccgatgccgtcacccagaccaacgtcaaggtggttgccgaatcacccgcaatggccatgagcaccatctaccaatccatgggccaggccacggcgatcctgttccaaaactcggtctcggctcaacagcaacaaaacaccctggcccaggcggctaccaaccagggcgtgatgcagatctacagtgtcgacaccaccgctggcgccgccgccacggaaaaagtcgcccaaggcggtgtggccgacaacttgaccagcctgctggccgtgctcaagtcgttccaaccttaagctgcaaggcccccaacagccccggcgcccacaaggctccggggctgttgtcgtgtgggcacttgatccgaaagatgagccggatgcgccatattcgttctttttttcgaacatcctattgccctgtacccccattgatcctaggattcgtttgagatttcaaacgctctgtctcccgtgcgctctttcattttttctgcgcgctggggctgatttccctgacggcagcccacaaggcgcctttcaacaactctaattcgctccgcgtgcgcgcggtgctgttaaggaaagccgacatgcagcttaaagacacccagttgttccgccagcaagccttcattgatggcgcttgggtcgatgcggacaatggtcaaaccatcaaggtcaacaacccagccacgggcgagattcttggcaccgtgcctaagatgggcgccgcggaaacccgccgcgccatcgaagccgccgacaaggccctgccagcctggcgcgcactcactgccaaggagcgcgccaacaagctgcgccgttggtttgagctgctgatcgaaaaccaggacgacctaggccgcctgatgaccctcgaacaaggcaagccgctggccgaagccaagggcgaaatcgtctacgccgcgtcctttatcgagtggttcgccgaagaagccaagcgcatctacggtgacgtgatccccggccaccagcccgacaagcgcctgatcgtgatcaagcagcccatcggcgtgaccgcagccatcaccccgtggaacttccccgccgctatgatcacccgcaaagccggcccggccctggctgccggttgcaccatggtgatcaagccggcctcgcaaaccccgttctcggccctggccctggttgagctggcgcaccgcgccggtatccccaaaggcgtgctcagtgtggtcaccggtagcgccggcgacatcggcggcgagctgaccagcaacccgatcgtgcgtaaattgtccttcaccggctcgaccgaaatcggtcgccagctgatggccgaatgcgccaaggacatcaagaaagtctccctggagctgggcggtaacgcaccgttcatcgtgttcgacgacgccgacctggataaggccgtcgaaggcgcgatcatctccaagtaccgcaacaacggccagacctgcgtctgcgccaaccgcctgtacatccaggattcggtgtacgacgccttcgctgagaagctcaaggtggcggtgaccaaattgaagatcggtaacggcctggaagacggcaccaccaccggcccgctgatcgacgaaaaagccgtggccaaggtgcaggaacatatcgctgatgccctgagcaaaggcgccaagctgttggccggtggcaaggtgatggaaggcaacttcttcgaaccgaccatcctggttgacgtgccgaaaaacgccgccgtggccaaggaagaaaccttcggcccgctggcgccactgttccgcttcaaagacgaagccgaagtgatcgccatgtccaacgacaccgagttcggcctggcctcctacttctacgcccgcgacctgggccgggtgttccgtgtggccgaggccctggaatacggtatggtcggcgtcaacaccgggttgatctccaacgaagtggcaccgttcggcggcatcaaggcctcgggcctgggccgtgaaggctccaagtacgggatcgaggactacctggaaatcaaatacctctgcctgggcatctaaggcacgggattgcagcaaacgcagagggcacgagagcgctgcccctttgcgtgtttcacatggttattcgcagtggccgggaaagctgtggcagtcgatcatcgcatgctgccgtagttgcctccccgccacctatccttgagccacgccgcccgatgagcggcgaatgaggactttatgagcaagaccaacgcttccctgatgaaacgccgcgaagccgctgtaccgcgcggtgttggccagattcacccgatcttcgccgaatccgcgaagaacgccaccgtgaccgacgttgaaggtcgcgagttcatcgacttcgcgggtggtatcgccgtgctgaacaccggccacgtgcacccgaaaatcatcgcggccgtgaccgcgcaactcaacaagctgacccacacctgcttccaggtattggcctacgagccttacgtagaagtgtgcgaaaaagtcgccgccaaagtgccaggtgatttcgccaagaaaaccctgctggttaccactggttccgaagcggtagaaaacgccgtgaaaatcgcccgcgccgccacgggccgtgcaggtgtaatcgccttcaccggtgcttaccacggccgtaccatgatgaccctgggcctcaccggtaaggtggtgccgtactcggccggcatgggcctgatgccgggcggcgtgttccgtgcgctgtaccccaacgaactgcacggtgtgagcgtcgacgactccatcgccagcatcgagcgcattttcaagaacgatgccgaaccgcgtgatatcgccgccatcatcatcgagccggtgcagggcgagggcggtttctacgtcgcgccgaaagccttcatgaagcgcctgcgcgaactgtgcgacaagcacggcatcctgctgatcgccgacgaagtgcaaaccggtgccggccgtaccggtaccttcttcgccatggaacagatgggcgtcgccgccgacctgaccaccttcgccaaatccatcgcgggcggcttcccgctggccggtgtgtgcggtaaggccgaatacatggacgccatcgccccgggtggtttgggcggcacctatgccggtagcccgattgcctgcgccgcggccctggccgtgatggaagtgttcgaagaagagcacctgctggaccgctgcaaggccgtgggcgagcgcctggtgactggcctcaaggccatccaggccaagtacccggtgatcggcgaagtgcgtgccttgggcgcgatgatcgcggtcgagctgttcgaagacggcgacacccacaagccaaacgctgccgccgttgcctccgtggtggccaaggcacgtgacaagggcctgatcctgctgtcctgcggtacctacggcaacgtattgcgcgtactggtgcccctgacctcgccggacgagcagttggacaagggcctggcgatcatcgaagagtgcttctccgaactctgacacgcccctgtaggagcgagcttgctcgcgaaaaacccccaggcaccgcgcttcaaaggctgcccgcgttttcgttgacgaccttcgcgagcaagctcgctcctacaaaaagaaaaagcaaaaaaaccgcttcggcggtttttttgtgcctgcttcattgtacgcacgcgcctgcattgtctaaggtgcaagcattgccgatggagcgtgctggatgactgctgttgatttacccgctgtaccccgagtgttaatcgccgaagcagacccttggtcgcgggacctgctcaagcaagtgctgttgaatgtgcgctgtgacgcacggctggatgtgtgcgccgatgggcagcacgccgccacgctgttgggcgaaaaaacctatgacctgatcctggcggattgggagctgccgggcgtggatggcctgagcctgctgcgcagcgtgcgccagaagcgccgttcgctgccgtttatcttgctaagcagtcgcaacgacagtgccagcgtgcgcgaagccttgcccctggcgcccaccgcctacctgacccgcccgctgaacatggaaagcctgacccagcgcctgcaagacctgctgctcaacgaaggcgaaagcgtgtactgcgaaatcccaccgttggcgccgggcatgaccttgccagccttccttgaacggcgccgcgaggtctgcgatggggcgccgttgcgcgtggatgtgaaagccgccgtgcaacacagcctcggccccgaaggcctggacctcaagcagttggaggaccaggtgcacagcgacccgcaaatcaccgccgtactcatcgccgccgccaacagcgccggctaccacggcacgccggtgcagaccctgccagaagccctgcacaagttggtgcccggccagagcatgaacctcatccttggcctggcgctcaagcacaacgtagtgttgggtgaccctgggctggtggcctacgccgagcggcactggcaattgtcccaggacagtgccgactacgcccggcgcctggcgcgcatgctggagcttgatcacgagcgctgctacagcgcctgcatcctgcaccgcttgggcgacctggctttgttgcgctgcctggaagactggcgccagggcggcggcgtgctggatgaccaaaccataggcgagtccctcgacgcctttggcgccgcctacggttcggcgttgcgcacgcgttggcgcttgccgctggagttgcggcagttgatcgcggggatctattcacttgaaggcggggtgtattcgcgcgaagccctggtggtgaacctggcggtgcaaatggcgcggctgaccgagcacgaagggctcgaagaactggctggcagcaagaccgcgcggctgctcaaggtaggcttgccagaactgacccgcgtgcgcaaaacctgaaacacacaccgatcaattgtgggagctggcttgcctgcgatagcggtgggtcagttaagccgccatcgcaggcaagccagctcccacagttggtcggtgttaaccggcgataacgcggttcttgccctggcgcttggcctcgtacatcgccgcatccgcccgggcaaacaggctgtcgagggtggagtcatcttcgcgcaggccggccaggccctgactgacggtcacgttaaattcatgcccctcatagctgaacaccaacgtctggatctctttgcccaaccgttcggccacctgcagggccatctccggtgggcaacccggcagcacagcagcaaattcttcgccgccaacgcgcccgaacaggtcgccccggcgcaataccccgcgaccgctctccgcgatacgccgcagcacctggtcgccctccaggtggccgtaggtgtcgttgatgtctttgaaatcatcgatgtccagcaacaggaacgccagcggcgtgccctgcgcgcaggcattgtcgaaggcttggttggcgagttcgaagaagtgtcggcggttgctgctttgggtcagtacatcggtggtggcgaggcgatgcagttccagctcaagttgcttcttttcggtgatgtcttcggcgatgcccaccacgatcagcgcttcaccgggcaccacctgctggttgatgtagcacttgtcgctcaaccagcggatctgcccgtcagcggtgatgatgcggtactcgcggtcctccacggcaccttgttccagcacgcgggccaggctgtgttcggcgtagtcgaggtcttcggggtggacgctgttgcgccattcacggtggtcggccagcagcaggccggcagagcggccaaacaggcgctcgtaggccgggctcacatacagcacgcggcgtgtttcccaatcaatggcccaaagcacggcgttcacgctgaccagcagtgagctgagcagttgctcacgctcactcagccgctcgacttcaccttgagcatgcataagcgccaacagggtcgccgccgcggccgggcgcggcggctctgcggtgggcacatcgggcaggctgggcttttcgtgaaccatcggtacaactctctctgggcgcgccgcaggtgcaaaggcggtcactacaaggggtcaccatgatggcgaagtgttctttgagagaggggaattgcggtgaagttccgtgaacggcgtggattgacggtgcccggaaaatggcgccaaaaagccagtgcgtgggagggcgagccctcccacggcgcccttacgccgctgtagggcgcaacgagtaagtcttcaactggtgggcaaaatcgcgcagggattggatgccgctggcctcggcttcatgcacccattccttgatcgcggccagcatatcgtggccgttggaactggtcttgagccagatctgctgcagcgccaggcgcttttcgtagatcacggtcagggcatggctgtgttccagcatgctctggatgcgcaggtggtggcggtcttccagcaagctggtttcccgcgacaacaggcgcttggcgcgatggaactggtggcgcactgaatgatcgaccttctcaagctcctgcttgaccagcgggccaattaccaacttgcggtattgggccatgatctggaagcggttgttgaggatcgccatggcagtgtccatgtccaggctgcccttgccttccacgcggtgggcgatgggcgctacacgctgcaccttggccaggcgcaggaagctgaacactttgatccaggcccaacccaggtcgaactcccacttcttcaccgacagcttggccgagttggggtaggtgtggtggttgttgtgcagctcttcgccgccgacgatgatgccccacggcaccaggttggtggcggcgtcacggcattcgaagttgcgatagcccacggcatgccccaggccattgatcacgccggcggcccagaacgggatccacatcatctggatcgcccagatggtgataccgatggtgccgaacagcagcaggtcgatcacgcccataagcgccacgcccagcagcgggtagcgcgtgtagagattgcgttcgatccagtcgtccgggcagttcttgccgtagatgcgcagggtctcggggttttccgcctcggcgcggtacagctcggcacctttgcgcagcacggtggacaagcccttgatcaccgggctgtgcgggtcatcgacggtttcgcacttggcgtggtgcttgcggtggatggcggtccactcgcgggtgttctgcgccgtggtcagccacagccagaagcggaagaagtgtttcaggccggcattgagctcgagcgagcgatgggccgaataacggtgcagatagacagtgaccccaataatggtcacgtgggtcatcaacagcgtgactgccaccagttgccaggcggacagatcaagaaaaccgttgtaccacataggctgtatggccctcagataaagaaaaaaacagcacccgcattatcacttcctttgcagataaaaccagtcactgtttcagataagacttacaaagtgtttcctcctctataatcctgatcctttgtagggcgattctggttatttagtaaggattactaaacatatgctgttttcataccgaggtgccctacgtgcggggttggtatacctgctggtttctatcgtttggctccagctcagcaattacctattaatcaactttatcgatgaacccatggagctggggcactggctgcaggcgcgtggatacgtgggggtcagcctcagcgcgttgctcatttactggataggccggcgttttgcccgcgcccacgcgttgcaacaacccctgaaagagaatcgcgagcgcctgcgccaggccgctgcggtgttcgattgcacccgcgaaggggtgctggtcaccgatactcaggggctgatcgtgcacgtcaaccgcgcgttcatggagatcaccggctatcagcgcgacgacgtcatgggccaacggccaagcctgttcaagtccgggcgccactcggcgcatttctaccagcaaatgttccaggccctggaaagcaccggcgaatggagcggcgaaatctggaaccggcgtaaaagcggcgaggtttacccccagtggcaaaccatccgcgtgattcacgacgaccagggcaaggtcagccactacgtcgcggtgttttcggacatcagcgccatgaagaactctgagcacgaattggcgcacctggcccatcacgacccgctcaccgacctgcccaaccgcctgttgtttaccgatcgcgccgagcaggccctggcctctgcgcaggtgcataagcgtggctgcgccctgctgttgatggacctggaccacttcaagatcatcaacgacagcctgggccataacgtcggcgatcaattgctcaagctggtggccgaacgtctgagcggcctgtttgggccgggggtgaccttggcgcgcctggggggcgacgaatttgccgtgctggcagaaagctgcccgcaggtggtgcaagcggcggccttggcgcagcgcatgctcaacgccatgaaggatccgttcatttttgacggcaaccagctgtttatcagcgccagtatcggtatcagcctgttccccagtgacgccctcagcgccgagcaattgctgcgcaacgccgattccgccttgttcaaggccaagagcgccgggcgcgaaggctacgcgttgtataccgaagagctgaccgcccacgcccagcatcgggtggaaatcgccggcgagttgcgtcgcgccctcgaccaacatgaattgcgcgtgtattaccagccggtgcacgacctgcacgacagccgtttggtcggcgtcgaagcactggtgcgctggcagcacccggaacgcggcctggttccgccgggcgagttcatccccatcgccgagcgcactgggctgattgccgacatcgatgcgtgggtgatggaccaggcctgccgccagatgtgccagtggctggccgacggcgcgccgctgagctttatcgccatcaatgtctccagccgcctgtttgcccggcgcgagctgtatgagcaagtcgcccaagtgctgcacaccactggcctggatccggcctttctggagctggaagtcaccgagagcgccgtgatggacgacccggaagtcgcgctggagcaactgcaccgcctgcgcgaactgggcctgcgcctggccatcgacgactttggcaccggctattcctcgttgctgcgcctcaaacgcctgccggtgcagaagctcaagatcgaccagggctttgtggcgggcttgccgtgggacgaagacgacgcggcgattgtgcgcgtggtgatcgccctggccaaaagcatgggcatgcaggtgcatgcagaagggatcgagcaggtggaacaggcgcggttcctgctggaccaggaatgcgacatgggccaagggtattggtttgggcggcccatgccggcccaggagattgattggacgcgggcccctctgatccgccaagactgactcggtcaatgtgggagccgggcttgcccgcgaaggcggtgtgtcagtcgctgcatctgtgactgcaccaccgctttcgcaggcaagccagctcccacagggggttctgcggcgcctgtgtgtgagcgtttttgctgccaaaactcttgcaaccccatgccccatcagaaaattctttctggttatataaacattcttaaatagtatttttaagaatatccgcgcttatctactatcgccctcacgccgcaagcagtgccgccactgccaggcactactcattttcaggagcgagaccatgagcgcatctctacgtagcgttgacggccaggacgaagcagccattttgcgtgaaatccagagcgccctgcgcgacctgcggtttggcgcggtggaaatcaccgtacacaacgcccaagtggtacagatcgaacgcaaggaaaaattccgtctgcagaaccccggtaacaaaccgagctgagctagaacggcgatagacccgcaattacaagaaaagccaatactcaagaatttcaggagcttctatgtcgtcgattcgccgttatgccttggccgcattggccagtgccgtgtttgccggttccgccgttgccaaggactacgagttgctcaacgtctcgtacgaccccacccgtgagctgtaccaggattacaacgctgaattcaccagcttctggaaacagtcccaccccggcgacaacgtcaagatccagcagtcccacggtggctcgggcaaacaaggccgggcggtgatcgatgggctgcgcgccgatgtcgtcaccctggccctggccggcgacatcgacgaaatcgccaagctgggcaagaccctgccggagaactggcagacccgcctgccggacgccagcacgccgtacacctccaccattgtgttcctggtgcgcaagggcaaccccaagggcatcaaggactggggcgacctgatcaagaaagacgtgtcggtgatcacgcccaacccgaaaacctccggcggtgcacgctggaacttcctcgccgcctgggcctacggcctcaaggccggcggcagtgaagccaaggcccaggaatacgtcaaagagctgttcaagcacgtcccgatactggacaccggcgcgcgcggttctaccattaccttcgtcaacaatggccagggtgatgtgctgctggcgtgggaaaacgaggcgttcctggctttgaaggaagacggcggcgccgacaagttcgacatcgtcgtgccgtccctgtcgatcctggcggaaccgccggtggctgtggtcgacaagaacgccgagaaaaagggcaacaccgagatcgccaccgcgtacctcaaccacctgtacagcccggcgggccaggagattgcggcgaagaatttctaccgtccacgggatgaaaaagtcgccgccaaatacgcccagcagttcccgaaactggacctggtgactatcgacaaagacttcggcggctggaaaactgcccaaccgaaattcttcaatgacggtggcgtgttcgaccagatctacacggcgcaataagccaaagtaactgtaggagcctgacttttttgtaggaactgggcttgtgtgggagctggcttgcctgcgatagcatcaccgtggtgtgactgacacaccgaggtgcctgcatcgcgggcaagcccggctcccacagaaaagccagctcccacaaaaagcgcgctcctacagtggtttctaccctttaaccaaggactcttatgtcgcgtcgtatctcccccgtcatacccggcttcgggctgacgctgggctacaccgtggtgtacctcagcctgatcgtactcatccccctggcggcgatgtttgtacacgccgctcaactcacctgggatcaattctggaatatcatttccgcacctcgggtactggcggccttgaagctgagcttcagcaccgcgctttacgccgcgctgatcaacggtgtgatcggcacgctgctggcctgggtgctggtgcgctacaccttccccgggcgcaaggtcattgatgcgatgatcgacctgccgttcgccttgcccactgccgtcgccggtatcgcgctcacggcgttgtacgcacccaacggcctggtcggccagtttgccaccgacctgggtttcaagatcgcctacacccccctgggtatcaccctggcgctgaccttcgtcacgttgcccttcgtggtgcgcacggtgcagccggtactggccgatatcccccgggaaatcgaagaggctgcggcctgcctcggcgcgaagccgttgcaagtgttccgctacatcctcgtgccggcgctgctgcccgcctggctcaccggtttcgccctggcgtttgcccgaggcgtgggtgagtacgggtcagtgatcttcatcgctggcaacatgccgatgaaaaccgaaatcctgccactgctgatcatggtcaagctcgaccaatacgactaccgcggcgccacctccattggtgtgctgatgctggtggtgtcctttgtcttgctgctgctgatcaacttgttgcagcggcgcatcgaacgtccataaggaggcgcggaacatgtcccaatcgtctatttccgccgcgtcctcggccaacgccgcccggcgtggcagcgcgacctcgcgacgtatcctgatcggccttggctggctggtatttgtgctgttcctgctgctgccgttgctggtggtggtgtcccagggcttgaagaacggcctcggcgctttcttcaccgcaatccttgaaccggacgcgctgtcggcgctgaaactcacggtgatcgccgtgctgatttcggtgccgctcaacctggtattcggcgtcagcgccgcctggtgcgtgagcaagtactcgttccgcggcaagagcattttggtcacgctgatcgacctgccgttctcggtctcgccggtgatcgccggcctggtatacgtgttgatgttcggcgcccagggcttcttcgggccgtggttgcaagaccatgacatccagatcgtgttcgccctgccgggcatcgtgctggcgaccatcttcgtcaccgtgccgttcgtggcccgtgagctgatcccgctgatgcaggagcagggcacccaggaagaagaagccgcgcgcctgctgggcgccaatggctggcagatgttctggcatgtcaccgtgccgaacatcaaatggggcctgatctacggcgtggtgctgtgtacggcgcgggccatgggggagttcggcgcggtgtcggtggtgtccggccacattcgcggcgtcaccaacacgctgccgctgcatgtcgagattctctacaacgaatacaaccacgttgccgcgtttgcggtggccagcctgttgctgatcctggcgctcttcatcctgctgctcaagcagtggagcgagaaccgaatcaaccgcctgcgcaacagcgcgggtgaggaataagtcatgtcgatcgaagtccgtaatgtcagcaagaacttcaacgccttcaaggccctggacagcatcaacctggatatccaaagtggcgagctggtggcgttgctgggcccgtccggctgcggcaagaccacgctgctgcgcatcatcgccggtctggaaaccccggatgccggcagcatcgtgttccatggtgaagacgtctccggccacgatgtgcgtgatcgcaacgtgggctttgtgttccagcactacgcgctgtttcgccacatgaccgtgttcgacaacgtcgctttcggcctgcgcatgaagccgaaaaaccaacgccccagcgaaagccagatcgcgagcaaggttcatgagctgctgaacatggtgcagcttgattggttgtcggaccgttatccggagcaactctccggtggccagcgccagcgtatcgccctggcccgcgccctggcggtggagcccaaggtgttgctgctcgacgaacccttcggcgccctcgacgccaaggtgcgtaaagaactgcgccgctggctggcgcgcctgcacgaagacatcaacctgacttcggtcttcgtgacccacgaccaggaagaggccatggaagtcgccgaccgtatcgtggtgatgaacaagggcgtgatcgagcagatcggttcaccgggcgacgtctacgaaaacccggccagcgactttgtgtaccacttcctgggtgactccaaccgcttgcacctgggtgacgaccagcacgtgctgttccgccctcacgaagtgtcgctgtcgcgccatgagctggaggatcaccatgcggcgcaggtgcgggatatccggccgttgggtgcgaccacgcgggttacgctcaaggttgagggccaaaacgaactgatcgaggccgaagtggtgaaagaccacgacagcctcaccggcctggcgcggggcgagaccctgttcttcaaacccaaaacctgagcccaacacaatacccctgtgggagccgggcttgcccgcgatggcgatgtgtcagtcgacggttatgccagctgatccaccgccatcgcgggcaagcccggctcccacattgggtcttcagtacctgttagaccgtggcgtttttcccgcgtaccgccaccggccccgaacgctcttcaatctgccgcttgaggtcctgccgcaaccccagcaaaaacgccaactccgccaccacaaacaacggccccacgatcagccccgacacatcgtccacaaacgcaggctttctgccttcgtagtaatgcccgacgaactgaatcacccagcccaccacaaacatgcccacgccgctgctcagccacaccgccgtgctttgcgccgccagcacatgcccggcccacaccgacaagcccatcagcaccgtcatcaacacgcccaaggccagttccaggcgcaggtaaaaccacgccgaaaacaacgccagcagcaccgcaggtgatagccacagcccgcccaccgaccactcggggcgcgacagcagcacggccaccgccaccacaatcagcgggataccgatgaagtggctggcgatgttgcgtgggtcgcggtggtatgcggcgtattgactgaggtggtcgacgaggcttttcattgttgttcctcctgtaggatgtttgatcatgccctgtcagcctgtacctaactgtcaactgggcgacaatcttcggagttcgcatggacacagggacatggcacgcgcaattggctcgcggtcattggttcagccatttgccgcctgacttgcagcgtagcctgctggaggcagcgcggttgcgtgtgctgacggcggggcagtacctgttcaagcgaggtgacccgccgtgcggcgtgtatgcggtgctggaaggcacggtgcgcatcagtgcggtcagtgcccaaggcaaggaagcggtgttgagcctggtggaaacgccctactggttcggcgagatctgcctgttcgacaacctgccgcgcacccacgatgccctggccacgggcgcatgcaggctgttgcaggtgccgcaggcggcgatgctcggcattctcgaacagcatccgctgttctggcgggagatggccctgttgatgagccataaactgcggctgtcgttgatcaatatcgaacagataagcctgatgcccgcctcaaagcgcctggcccatcggttgctgatgattgcccaaggctacggcgaagtggagcaggcgcgccgcgtgctgcacctgccccaggaggatctggcggcaatgctgggcctgtcgcgccagaccatcaacagtctgctcaaggcgctggagcaacagggcattatcggcttgagttacggcgccatcgagatatgcgacctcaacgggctgcagctggccgcgggcctatgaaccgcgataggtggagaagccgtaagggctgagcagcagcgggatgtggtagtgctggtcggcctgcttgacctggaaaatcaccggcacctcggggaagaacgtctcgcggttagccttcttgtagtaatcgccggtcttgaacaccacgcggtactcgcccggctgcaggctgcggttggccgggaacagctcggcgatgcggccttgctggttggtgacaccttcagacagcgactgccatttatcgcccacgtgctgttccagggtgacattgaccccggcgcttggcaggccattttccaggttgagtacgtgcacgctcagcgggttgccgtcggccagggccaggttgcacaggccgctcaggcttagtgcggcaagggtcatgctcaaggttttcatcgcgaagtccttttgagggaagtggaatcaaggggtgattttcaggcccagttgctcggcggcctgcacggcgcaggcttcatcctgcgcggcgccaccggcaccggcgatgcctagggcaccgaccagttcggcgtcggcaaacagcggcacgccaccgccgagcaacagcagctcgggcaagctgttgaggttggcggcctcggggttattacgcgcccgttcggcaaacagccgggtcgggttttttgtcgacagcgccgtgtacgccttgcgttggctggcgaggctgttgtgcgggccaacaccgtcagcgcgcaggcccagcaacaggttgccaccgcggtcgaggacggtcagcgcagcggtgcagtgggccaggctggcgtcggccagttggcgagcggtgtgcagatccaactcggcgtggcgtggcaattgtggcgccgcctgggcggcggtggccacggcgaggctcaagaacaaggcagtgcggtacatagtgagggctccagaaagcaggccgtcacggtaaccagcggatgcggacaaaagccgcacaattggatgacaggtttgtaatcaaactggctgcatggggtttgtacctgtcaactttgacagtagatttgatgtttcagagggcgcagactttgattgtcagtcgtgacaatcgaggagttaaggctcatgtcagaaaattcttgtgatgttttccctccaatatcgaggccaggaaaacgggtagaaaacccaccggttgtagaactaccggtgaaaggtggaagttatgcgagcccagtgatgttcaaaggcgcgggtcttcccgactgggacgtctacttctcccttactccggtaaatggggataaatttggcggcgctaaagttaagccagatggatcatgggagttcacacattttctggacccaggtgaggtcggtgttttcgggtggcaggaaacaactctggagcgttccgcatggacatctgttattagatttacggtggagtgagcgggtggtttttggcccggttcaggagtcgttcttgtgggaagacagcgcatgcttgggtggctactgcaaatccccccgaaactgccccggcgtcatccctgtccagcgcttgaacgcacggttgaaactgctggtatcggcaaaccccagcaaatggctgatctcggccaatgagcactgcgggtcgcgcaggtgcaataacgccaggttttgccggcactcgttaagcaaggcgtcaaaccgacacccctcatcggccaagtgcctttgcaggctgcgcaggctcaagtgcagcgcttgtgcaatgcgttcggcactcggctcgccgtctggcaattgcgcctcgatggcggcgcgcaccttgcgttcccaggtcagcggttgcagttgggcgagggtgcgcttgagcacggtttcgttgtgttcggccagctccgggttggcatcgtccaggtggctgtcgaagtcgctggcggcgaactccaggcggtcttcgtcggcggcaaagaatactggcgagcgaaataccgtatgccacggcttggggtcggcaggttccgggcgccgtaggtaaacggccagcggcgcatagtcacgcccgaggcggttgcggcaggtgcgcacatagatcgccgcaaaggcatcgatcgcttccggcgcgggcgcggggctgcctgggggttggagcaggcgaaaacggtagacgtcgccgtggcggctcagctccaggtccagggcatcactgaccacctggtgatagcgcacgatgcgctcgaacacctcgcgcaagctgccgctggccaccaatgcgtaacccagcgcatgaaaggtggtggggctgacaaaccgcgacacccgcaacccaatcgccgggtcgccactggcctctaccgccagcgcccataagcgcgtagtggccgacaaccgatagcgggcgttggggtcgtccatctgctgcgggtccagcccggcttcggcgcacagcgcggcgctgtcgaggcccagggcgtcgagctgcttgcgcagggcgcgggtccagctggcgagggaagtgggttcggtcatggcaattggcgcttgtggtcaaaagattggcgtgcgcggctagcgtcctgcgctagggttaggtgcaggattcaggcatcacttcacaagagaatggaagcatggacggtacttctgcaagcccccagccgttgaacgcacaacagcgttcggcgcatatccgcgaggtggtgatggccgagggcgtgcgcctgcgccagcggcacccctggttgttgcatcaggacgcgctgggcgcgggcatcctggcctttgccttgttaggcatgctcggctcggcggcgctctatatcagcggtcacatggcctggtgggtgtgcctgctgctcaatgcgttcttcgcctcgctcactcacgagctggaacacgacctgatccacagcatgtactttcgcaaacagcgcgtgccccacaatttgatgatgggcctggtgtggctggcgcgcccgagcaccatcaacccgtggatacgcaggcatctgcacctcaaccatcacaaggtttcgggcaccgaggccgatatggaagagcgcgcgatcaccaatggcgaaccctggggcatcgcgcggttgctgatggtgggggacaacatgatgtcggccttgatccgcctgttgcgcgccaagacctggccgcacaggttcagcatcctcaagcgcgtgctgctggtgtacgcaccgctggccttgctgcattggggcgcgtggtacgtcttcctgggctttcatgccgccaatgggattgccagtttgatgggcgcgcccattcagtggtcagctggtaccttgcaggtgatgcaggtgatcgatatcgctgcggtggtgatcatcggcccgaacgtgttgcgcaccttctgcctgcactttgtcagctccaacatgcattactacggcgatgtggagctgggcaatgtgatccagcaaacccaagtgctgaacccctggtggctgtggccgttgcaggcgttctgcttcaacttcggcagcacccatggcatccatcactttgtggtgaaagagccgttttacatccgccagatgaccaccaaggtggcgcataaggtcatggccgagatgggtgtgcgcttcaatgatttgggcacctttgcccgcgccaaccgcttcgagcgacgtgagcaggcacacagcgatttagctcacctcagcaggcaataaacgccaggggcaaatcgcgaatctgttcgcgcacgggtggttggtagtggtcatcgctgatcagctcgtgcagcagttcttcgcgcagttggtgaaattcaaagctgctgcgctggcgcggatggggcagggcgatgttcaccacttgcttgatgcgcccgggcctgggctccatcactaccacgcggtcggccaggaaaatcgcctcttccacatcgtgggtcaccagcaccgtggtgatcctggcgcgggcacgaatcgccagcagttcatcctgcatctgctgacgagtcagcgcgtcgagggcgccgaagggctcgtccagcaacaggatgcgcgggctggccaccaggccgcgggcaatcgccacccgttgcgccatgccgccggagagttggtgcgggtaggcacgggtgaagtcggtaaggcccaccagctcgataaaatcgttgatgcgccgcgtgcgctcggcctcgctcagcggctcgttgaccaagcccaagccgatgttttgcgccacggtcagccacggaaacagacggtgctcctggaatacaatgccgcgttcgccgccgataccgctgacagcgttgccatccacctggatctcgccgcgaaactgcgtatcgagccccaccagcaggcgcagcagggtcgacttgccgcaaccgctggcgccgacaatcgcgacgaattccccttcggccacctccaagttgaattcacggatggcttccagttcgaagccatcgacgtcgaaggacttgcccacgtggttgaagctgacaatcggtgcgttcatgcgtgtctccagcgagtggcgcgggtttcgaggcgttggccgagcaggttgagggtggcgccggtgaggccgaccagcagcatgccgctcatgatcaggtccatgcgcagcagctgttgggcaccgatcatcaggctgccgatgccgccattggagggcatgaaatattcggcgccgagggtgcccatccacgcgtagatcaggctcaggcgcaggccggcgaaaatgcccgacgcggcgcccggcagcaccaggcgacgcaggcgttgccagaggttcaggcgcagcacctgcgcggcttcgcgcagctggggcgacaggttgagcacgctgcgctgggtggcgataaacaacgggaagaaggcggcgagggcgataaacacccacttggccaactcacccaggccgaaccaagcggtcagcagcggcacccaggcgaaaatcgcaatctgacgcagcgcggacaaggttgggccgaacagtcgctcactgcgccgcgacaaccccagccacaggcccacggcaaagcccaggctgccgccgagcagcaagccgcccagggctcggcccaggcttttgcccagggctgtggtcaggctgccatccagtgcgccggccagggtggtttgcagcacggtccaggggctgaccagaatgttcgggtctacccagccctgttgcgtcgctgcctgccacagcgccaacaacagcaagggtaacaaccagggctgcaggcgttgccagccttcatagcgtggcccgcggcggatctgcgcggtggcagggtggggccagtgcacccacttgcgatccagccagccgatgccgcggtccatcaccacacccagcacgccaatgaccacgatgcacacgaagacgatatcgagcatgaacaactggcgcgcccacaccatcaggtagccgatgccttcgctggaggccagcaactccacggccagcaaggaagtccagccggcccccagggccagacgcacgccggccatgaacgccggcagtgcggcgggcaggaccagacggcggatcagcaagtggccaggcaggcgcagcacccgggcagcttcgcgcaggttgggctgggcatcgcgcacgcccaccagggtatgcagggtcacgggcaccacgatggccttgaccagcaccaccagtttgagggtttcgccaatgccgaaaaacaccatgaacagcgggatccaggccagggtcggcacttgagccagggcgctgaaggtcgggaataccaagcgctcggcgcgcgcactgaagcccaggaacgcacccagtatcgcgccggcactgataccggccagcaggccccagaacaggcgctgcaagctgatcgccagatggctccataactcgccgccggccaactccaccgcgctgctccacaccagggcgggggtgggcagaatctgctcgctcatccaatgattgcggctggccagccaccataaggcaaacagcgtgagtggcagcagccacggcaataaacgctggcccagctgcggccagcgcggcgcgatgcctttgggcggggccgccagcggcaggctcagaagtgaaatccgggccatggaagacctccgaatgcgttatgtgatttcgatcttacaaaatcgtgatcaagatgattgtgagataagaaaagtcatttaaagcctcacaccgccacgcatccaatgcattcgaagaatattttcgatgctgtttgtgcataccccgctggaggctgcgggttagcttgtatagttctaaaagctattaaattgtgaatttatagtatttaaagttttgttcagtctgtgcctactttttgctccccaggcgaccgtcgcccaccaggagctgcgcttatgaaactgccctttaaacgtctgatcagcctgttcgtcggcactgccctggccgggttggtgcatgccgccgacctcaaggaaatccgcattgcggtgcccgacctcagtgccggcagccagcacagcggcggtggcatcaccgacgtgttgcgtgaacagcagatctttgaaaaagcctttgccgaccaaggcatccagatccagtggaattatttcaagggcgccggcccggtgatcaacgaagcgttcgccaacggccaggtggacctggcctatctgggcgacctggcggcgatcatcggccgctccaatggcctggacacgcggctgctcagcgcctccgcacggggagtgaaacactacctcggcgtggtgccgggctccggcatcaagaccttgcaagacctcaagggcaagcgcgtggcggtgttccgtggcacggccagccagttgtcgttcgacagcgctttggccagccagggcttgagcgagaaggacctgaaggtgatcaacctggacttcaacgcggccgctgccgccctggccgccaagcagattgacgccacctggggcggttccaccctgacggcgttgcaggccaaaggcttggcagagataccgctgaccaccaaagacctgggcgatgccggcagcatccaggccgtgctggtgggcagcgccaaattcgtcgatgaacacccagacgctgtggccacgttgctcaaggctcagcagcaagcggtgcagtggttgaccgatgacaataacaaacaggcgtacatcgcactggtgtcagggctggccagttacccgccggtgatcctcaccaatgatttgaaagaccagaaactcagcgaagttttcccctccacactggacccggtgttccttggcaaattgcaggatgcggtggacctggcgtccagggagaagttgattcgcaagtcgtttcaggtgagtgattgggtggcgcctgggttggtggcggcggggctctgagcttgtcggtgcctgggctatcgctatcgcaggcaagccagctcccacacacttgaatgtgtacaccgctcaaatgtgggagctggcttgcctgcgatgaggcccgtcaaaccgccacactcacctgctgactatccacctccaccaaggtctcaatcatcgccttcgccgccggcgacaaccgcgaccccgtgcggctgacaatcccgcagcgtgcactcagggtgtccatgtgctgcggcaagttgcgccagtgcagcagtaccaacgcccccctggcaatgtcctcggcaaacgcttcttcagtgccgacaccgatggcattggtttgcagcacgatgctcaccagcgccgggaagtgctcggtctggatgctcggtgaaaaatccatacgcccactcaggttggccaacagcttgcgaatgccttgggaaatcagcggcgccgccagcgggtagtcgaacatatcgttggtcgacaggctgtccttggccaacaacgggtgcccagggcggcagaaaaacaccccgcgtttgggggtgagtgcgcgggtctggaaattcgggtcggcctcgaactgacgaatgtcagcgataaagaattcgatctcttcacggctcaggcggcggctgagggtttcccagttatccacctgaaacgtggtgcggattttcgggtgcgcgttgataaaccgcgccacggcatccggcaccagtttcaccgcgggcgccggaccgcagccgaaacgcaggtcgccggcgtccagcttggtcatgcgcgtcacttcactgctcagcagcgctgcgccatgcaccaggctcagggcgtgctgcaacaccacctggccttccggcgtggggcgcaagtccttgtggccacggtctacgagcacgcaaccgaactcctgctccagcccctggatgctgcggctgaacgctggttgggtgatgcccatggcgtccgcggcacgcacgaaactgcggtgttcgttgagggcgatgaagtagcgcagttggcgaagatccatatgctttcccggcattttaaaaataggtcgaaggcatttgcgaccgagcaagctgaggttttaaatgcaagctcttatttcgtcaacgaagcattcattcatttgctagacctaaattgcatatgaatagagcgttgctggaagcgtcccccaccatttcgcaggcacatgagggtcatcacaatgagcaacgccgcattagccgttcaacccatcgcccacgcactcgatattcacccggtggccgggcgaatcggtgccgagatccgtggcatcaaactgtccggtgagctggatgccgccaccgtcgaagccattcagcaggcgctggtgcagtacaaggtgatcttcttccgcgaacaaacccatcttgatgaccagagccaggaagcctttgctcacctgctcggtgagccgattgcccacccgacggtgccggtgcgggacggcacgcgcttcttgatggagttggatggcacccgtggccagcgcgccaattcctggcacaccgacgtgactttcgtcgatgcgtacccaaaggcctcgatcctgcgttcggtgctggcgcctgcttccggtggcgacaccgtatgggccaacaccgccgctgcctacaacgacctgagcgtggaactgcgcgcattggctgaccacctgtgggcagtgcacagcaacgagtacgactatgccgcccgcaagccggatgtggcggtggagaagctggaggaataccgcaaggtgttcacctccacggtgtacgaaaccgaacacccggtggtgcgcgtgcacccggtcagtggtgagaaaaccctgctgttggggcacttcgtcaaacgcctgaaaggctactcccaggcagagtcggcgcagttgttcaacctgctgcaaggccacgtcactcgcctggaaaacaccgtgcgctggcgctggaacaccggcgacgtggcgatctgggataaccgtgccacccagcattacgcggtggacgactacggcacccaggagcgcatcgtgcgccgggttacgctcaagggggatgtgccggtgggggtgcaggggcaatcaagcaaaaccactaaaggtctttaatctgagtgaagattaaaaaatgtgggagcggggttgcccgcgaatgcgcagtgtcagtcgacgtattcatcaactgacccactgcattcgcgagcaagcccgctcccacatttggattcgtggtgtttaccagactccgatcttcaccactttctctgcctctggctcaccataacgaaaccattgcccacgcagttcaacctccgtgtggctgatggtggtgcgccgcttcaaaccgcgcagccagtcgaacagataacccaggtgcgtctcgcgcacctgggcataggcaggatcgctgcccaggtcgtgcagttcttgcgggtcgttttccaggtcgaacagttgcgggcgaaagccgtcgtacgccaggtacttccagcgctcgctgcacaccatggtcatgcggcaacggtcgatgggttgctccaggcgctcgcgagccggggcctggaaggcgtagtcgtattcggcaatggcgtagcggcgccagctgggttgctcgccctgcagcaatggaatcaatgagcggccttccaggcgatggtcggcggcgggcaagcccaaggcgtcgaggaaggtgggcagggcgtcgatggtttccaccaggcgctcgtctacggtgccgcggctgatatcggcgctggcacgcgggtcgcgcacgatcagcggtacacccaccgcaggctccagcaagaattctttttcaccgaggaaatgatcgccgaggaagtcgccgtggtcgctggtgaacacgatcagcgtgtcgtcccagcggccagtgctttgcagaaaatcgaacagccgcccgagttgatcgtcgatctgtttgatcaggcccatgtaggtcggaatcaccgtgaggcgcacctcgtcacgggaaaaattctggctctcctggtgttggcggaatgcctggtacaccgggtgatcgctggtgtgctcaggttgaatcggtgcctgtacatgctcggtaccgtacagcgcgtgataaggcgccggcgcgatgtagggccagtgcggcttgatatacgacaggtgcaggcaccagggctgttcaccttgttcgtcgataaagtcgatggcgcggtcggtggtgtagacggtctccgaatgttcttcggccacacgtgcgggtttgccggcgttgcgcatgtgccagccgctgagcacttcgccgttctcaccttcggcggcgttggcccattcgtgccaagggttgctgccgtggtagccgtgatcacgcaagtattgggtgtagggcgcggactcgcgcttatcctcgaacagcgggctgtcggggtagatgccgtcgtgacgcagatacgcatcgaaaccgacctcattgagtggctcggcctgggcactgtcggggtcgatctgcaggcgctgcaaggcctcaaggttcggcgtggcgtgggtcttgcccaccagtgcggtgcggatgccgtgggggcgcaggtagtcgccgatcgtcagttcttccaggggcagcggcactgcgttccaggccacttgatggctgctgacataacgcccggtgtaggccgacatgcgcgacgggccgcagatggtgccttgtgtataggcccgactgaaacgcacgccagcgtcggccaggcggtcgatattcggggtgtgcaaatgggcatggccgtagcaggacaggtagtcgcggcgcagttggtcgcacatgatgtagagcacgttgcgcacgggtttggcgtcagacataggaatttaccgaacggaggacaggtgggttttttcgccgttcgaggggcgctctggcaagtgcatttggggactgggttctatgcattgagtgcatgggtgtggctgctgacgtcattgcaggcaagccagctcccacagttgaaatgcattcccctgtgggagcaggcttacccggcgaaggacctgatgtgagcggccagtcctgccagcgctttatcatctgccctggccgcgtcatgggaggagacatagccttcataacgctcaaaatatttgtcctgggtcgaactgatttttttgaaggcgctatcttccccggtcccgtgcatcgggaataatttggcgtgcagatgatcgacgccataaccctccagaatcatgcccgttctagccacaccttttagcgctttgtccaaaagcttcgccgtcttcttggctgcgatgaccaagtcacacagcacggtgtccggttcggcaaacgcatagctgccgtgatgggttttggggataaccacactgaaccccggcgtattgggaaatatggagagaaaggccatgtgggtctggtcttcccacaggaggtgggagagtgcagtaccgcgggcaatgctgcaaaagatacagtccatcaaacgcgcttcctcgtgcgggtcaaaaggttatagaccctcttgtaggtgatctttgttatctaatgatgacttcacgcaggtgacgggcagccgcttagtcagaccgcaatattttccaacgcataagcatcctcgtccctctcatctatctccttgatctgctcaatcatcgcctgcgccagcggcgacaaccgataccctgcgcggctgacgattccgtagcgggtgtagcgctcctccaggttttcgtccaatccctcaatctgcaaacacaccagttcgccgcgcgccatgtgcagcacgtcgctgttggcgctgacgatgccgatggcgtccgagcgcagtaccacgcccatgaggctgtagccgttttcgcattccacattgggctggtaatccggccggccgctgaggtcgacgatgactttgcgcaggttcggcgggcggatggtcactgccagcgggtagctcatcagctcggcggcgctgacgctgttgtgcgctgccaaggggtggccggcgcggcagcagaagtgccaacggcgcgggcgcaggcggtgggtgtggtagtcggggttggcttcgaagtggcgggtgtcggcgacgaagaattcgaactcttcgctgagcaggcgcttgcccaggctttgccagtcgtccacctggaactgcacgcgggccttggggtagcgcccgataaaactgccgatggcacgtgggactaaccccgctgccggcgcggggccgcaaccgaagcgcagttcaccggcttccaggccattgaactggctgatttcgttggccagttgttgtgcgccactgaccaggcggcgtgcatgttcgagcagcacctggccttgcttggtgggcgccaggtctttgcggccacggtccaccagttggcagccggcactgtgttccagggcctggatgctacggctgaacgccgactgcgacaggttcaccgctgcggctgccgcgacgaaactgcgctgttcggcgagggcgatgaagtggcgaagctggcgcaagtcgatatgcatttttcacatcaaaaatatccgggaaatgcattggctatgcattacgtcgactccttataaaggctatctcttatgcagtaaatgttcgtaaaaacataaataaataacctttgggaatattaggcgacgagtattccggggttctggagccgcttatgagtctgttcaagtccttgcccctggctatgttggtggccggcagtaccagttggtcgccggcccaggccgctgaaaaccccgcgcctgctggcaagggcgaaagcgccagtggccaactggaaaccgtcacggtgactgcccggcggcggaccgaaagtgcccaggccgtgccgacgcccatgagcgtggtcggcggccaggccctggaaacccagcgggtgtatcgcatccaggatttgcagcaattggtgcccagcgtcaacgtcgcctatatgcatgcgcgccagtccagcgtatcgatccgcggcctgggcaacaacccggccagcgatggcctggaaggcagcgtggggctgtatatcgacaacgtctacctggggcgcccgggcatggcggtgttcgacctgatggacatcgagcagcttgaggttttgcgcggtccccagggtacgttgttcggcaagaacaccaccgctggcgtgatcaatatcagcacccgcgcgccgagttttaccccagagcgcagcatcgaaacctccctgggcgaggacggttatttccagaccaagggcacgatttccggacccctgaccgatgacctggcggggcgtttctcggcctatcgcacgcgcagcgacggcgatatcaagaatgaacatgacggccatgatctgaacggcggctcccgccagggctttcgcgggcaactgctgtacaaacccagcgaggccttcaacctgcgctggatcggcgactacaacgaagaagactccagcgccggcacccgcgtgctgtacagcaccgggccgaccatcaatggcaccaacctgtatcaatcccgggccaacgcggcaggcgccaccctggtggacggcacccatcgcaaggtcaacctggacaacgaccagcacgtcacggtgttccagggcggtacgtcgctggaagccaactggacgctgcccagcgacttcaccctgacctcggtgagttcgtaccgctggtggaatttcaccccgcgcaacgatgacggcctcaatgtaccggcgtcgtataacgccggggtttcggtggaagataagcagtggtcccaggagtttcgcctggcgtcgcccagcggtggtttcttcgattacgtactcggcgcttactacttcggctccgacctggataacaaatcctttgcctactacgggcccaaggccgatatctggaacggcacgcctgccggtgcgttgagcaatgtgagcagtgtgggcaacgggcatatccgcaccgacagcttcgcgctgttcgcccaaggcacctggcacctgaccgagcgcctggatttcaccgccggtgtgcgcggcacctatgaagaaaaaagcgcctgggtcacgcgcaatgcgccagtcggtggcgcggcggtcagcgggcctgccgccacggcgcggcgtgggcgtaccggggcctatgattcaggcgacctgtcgcaatacagcgccacgccgtcggggctgctcaacctcagttatcacttcaacgaaaacctgctgggctacgcgacgctgtcccatggcgagaaatccggcggtgtgaacctggcggtggggtctgcgccaacagcgggtgccgactcgttgctgatcggcaccgagcgcgccaacaacgccgagatgggtttcaagagcacgttgtgggaccgccgcctgcagctcaatgccaacctgttctggacccaggtcaacggctaccagaccaacgcctacgaccaggacaaccgcgtgcagtacctgaccaacgccggctcggtgcgctcgcggggcgtggaagtggaaagcaccctggtgccgatcaagggcctgaccctgaacatcaacggctccttcaatgacgtgacgtacctgtcttacaaggatgcgccatgcccgccggaaaccagcctgcgtcccggtgcgccggcgtcctgcgacttgagcggccatcaggtagtgggcgcctccaagtggatcgccaacgccaacggcgagtacaagtggaacctggcgaacggcttcgaaccctacgtcaccgccagctacgcgttccgttccaaggcggtgggcacggtggaagattccgactacgggcagatcccggcgtatgcggtggtcaacctgtctaccggtttgcgcggcgactatgaccaagggcagtgggatgtgtcgctgtggctgaaaaacgccttcgacaaaacctactacaccactctgtggaccggcggtaacggcggttacgagggcttgctgggcacgccgcgcaccttaggcgtgactgggcgctacgacttctaggtcggtgcgataggtggccgggctgaacacccgcgtcaccagcagcattgccactaccgtcaccgtcagcaccacccaggcactgacaaagttgccggtaagctcgcgcagccagccggtcagccacggcgaaatcgcattgatcaaaaagcccaggccttgcacgaacgccgccagttgccccgcttggcgagggtcgcgatggtggtcgagggtcagcagcaggctcagggcgaaacaggcgcccaggccgaagccgcacaaggccacccacaggtgaggatattcctgcggcgcaatgatcaggcccaggtagccaatggtttgcgccaacaggctgatgctgagcaatgggcgacggtcgataccgcgttgcgccagcactggcatcagcagggcggccgtcacctgaaaaatcgtcatgaacgccaacaatgaaccgctgggcagcacgccccaacccagttgctgatagtaggcgggcagccacgcgaccatgctcatgtagccgcagttcaccaggccgaaatacagcgccagcaaccaggcgcggcggttgcgtaaccctttgaacgcaggcgcctgctgtgggtttcgtgccgcgcccagcggcagccaggcccacagcagcagtgcccccagcgccggcaggagccacacacccaatcccgcctgccattgctcgaaatacgtggccactaccgggctgaacaacgccgccagcccaccgccggccatcagcgaagctgagtacacccccatcgccaccggcacgcggtgatggaattcgcgcttgatcatcgccggcaccaacgcctggatcagcgccacgcccgcgccgccgagcagcgcggtcaccagcagtgccgaagcctggcccatcagccagcgcgccaggcacgccagcagaatcatcaacaagcccagggcgatgccgcgacgctcgcccaggcgcgcctccacgcgcacgccgaccagtgccaccaaccccatgcagatcaccggcaggctggtgagcagggcgctgctctgaaagctcaggccggtggcctggcgaatctcgccgagcagcgggctgatggaactgaggatggggcgcaggttcaggccgagcaccaccagcaggccccagccggcgagggatttattcaggctcatgcagggttttccactggtgatacagcgcagtcattgcggcgtcgggaaggtgctggatgggcaggcgttgcgcgccgattggcaggccgacctgttggccaatggctgcggtcgacaggccgaacggctcggccatttcgttgctggcggcaaacactacgcgttctacaccgcacaggtacatggcgctcaagcacatcgggcaaggctgtccgctggcatagatcacgcacccttccaggcgtgcgcccagttgtcggctcgctgcgcggatcgccagcagctcggcgtgggcggtggggtcctgggtcaggtggatctcattcacggcttccaccagcacctcattgttgcgcgtcagcactgcgccgaaggggcggccaccttgggcgacgttggcgcgggccaaggcaatagcgcgttgcaggtgtggttgatcgttggtcatacaaggcccccggatgcgatgaaaggtgaagtatggtcagccagcaaggtattctgaaattaaatataaacatgccaatcagtggcaaacacaatggtgatgacgttgttcgatcccgtgttgttgcgcagctttgtcgccgtggtggactgcggcaatttcacccgcgccgccgagcgcctgcacttgacccagtccaccgtcagccaacagatccgccgcctggaagacgcagtggcttatcagttactcgaccgcgaccagcgccgggtagtggccaccgccgagggtgagcgcctgctcgcgtatgcgcgccgcatcctcgcgctgcacgaagaagccgccgatgtgctgatcaaccagcaaagcgatggcgtgttgcgcctcggcgtgccggaggactttgccgccgagcgcctgatgccgctgctttcggcgtttgtcgtggcttatccacgggtgcgactggaagtcaccagcgggctgggccctgaattgcagcgccagtaccggggcggtgagttcgacgtgttgctggtcaagcaaatgggtgacagcgacgactgtgtggcgtcgtggccggagcccttgtactgggtcgacagcctaagcaccccggccctgggccgtgacccgctgccgctggtggctttccccgtgggcggcctgtatcgcaacgacatgctgcaccatcttgagcgtgccggttggcgttggcgcatcggctattccagtgccagcctggccagcgtgtgttcggcggtggcggcaggcttgggcatcagtttattgccggaacgggtgttgcaaccgggccatcgcatactcggcccagagagtggcttgccacctgttcatggcgtgcgattggccctgtatggccgcagtggtttgggcgccgcgggccagagtttgctgggtgaattgctggctttgtgcagtggaaacccgcactgagccatacctttgctgaatattttgtatgcctttagggcattgaaaaacgacggcttgaagccaggccacgtaccccgtggctttggcgttaacggctgttttatatatgcaattttgttctatttataactttaaagattactttaagagataagtgtctggccccgatgattcagccctcgacgggccttcacgtaggccccgtcggtttttcaaaaccgcagggagtgaatcaatgggcaatgtccagaccgccgccagtgcacccgaggcgcagtggcgccaggcaccgagtggtgagttggtcgaccttggccggccgcatcgcgcgccgttggggcaattgcgcctgcagaagaccccgaagcgtttttccagccgccgcgaaggggttttgctcgggttgctggtgttggcgctgcacggtgcagtgatctattgggtgagccagaaacccacgccggtgctgccgattgtgccgccggaaattccaccgatgaccatcgaattttcccagccggcgccgccggtggttgaaccgccaccgcctgtaccgccaccaccgccaccgcctgtggtcgagccaccgccgccggtggtggatgagttggcggccaagccggcgccgcccaaacccattgtgaaacccaagcccaagcccgtgcctaaacctgagcccaagccggcccccaaggccgtcgagcagccacctgcaccaccgacgccagcgccacctgcaccgcccgcacctgcggcgccagagccggtgacgcctgcttcggccaacgccgcgtacctgaaaaacccggcgccggaatacccgtcactggctcagcgccgcggttgggaaggcacggtgttgctgcgcgtgcaggtgctggccagcggtaaaccgggtgagatccaggtgcaaaaaagcagcggtcgccagcagttggatgacgcggcattggcagcggtgaagcgctggagtttcgtgcctgccaagcagggcgatgtggcccagaacggctgggtcagcgtgcccatcgatttcaagattcattaattgttcagcggcgcagagggaaaacatcatggcattggcatctccacttgaatccatcgaaagcgcggtgatctggctgctggtggccttttcggtcgccacctggtgcctggccttgctcaagggcgtgcagttcggtcgcctcaaagcccaggatcgcaagtttcacaaacagttctgggcggcatcgagcctcgactcggccgccgaactcgccgacacccagcctggcgccgccgcccgtgtagcccaagctggctatgccgcgatccaggtgggcgataccacccacgctgcggatttgagccaggcgatcaatcaccaggaccgcctcgaacgcgccctgcgccagcaaatcgtgcgcgagcgccgctccctggagaccggcctggccgtagttgccagtatcggcagcacctcgccgtttatcggcctgtttggcaccgtgtggggcatcatggaagcgctgaaggggatcagcgccgccgggtccgccagcctggaaaccgtggctgggccgattggtgcggcgctggttgcgaccggcgtggggatcgccgtcgcggtgcctgcggtgttggtctacaactatttcctgcgccgcctgaagctgacggcggcagacctggatgactttgcccacgacttctacagcctggcgcagaagaactcattccgcgtgctgttgcatccgacactgaccaaagccagcgtcgccagcccgcaaaaagtgaaggaggcgtcctgacatggccttctccacgcaagacagtgatgaggtgctgagcgagatcaacgtcacgccgctggtggacgtgatgctggtgctgctggtggtgtttatcgtcaccgcgccgctgttgaccaactccatcccgatcaacctgcccaagacccaggccgtagcgccggtcgagcagaaagacccgctggtggtgagcatcgacggcgcaggcaaagtgtttatcaacaaggacgccatccagccggacctgctggagttcaacctgcaggcggccaaggccaaggaccccgatgtacgggtgcaactgcaggccgatgacggtgtgaattatggcgaagtggcgcgcgccatggcgtcgatcgagcgcgcggggattaccaagttgtcggtgatcaccgcacggtagtttcaaaaaatctcgacagtttttgggccgctttccttggcagggtgcggcctttttttatttaagggtcaggtatttatggatgttgcacaggaaaagaatttacatgtttttgagtgtttccaagcgtgcaattctggacgacatgattatgctgggcagtgcatggagcaatttaattaatggagaaattacatgcctatacggtttcctgttcagctggtaaacacgtttgtaaatccgcaggtgtcaactgataagcctgtagaaaattccccggtggtggtctctccaccctccggttcaccacgtctcaaacatccttcagcctgtaagccgccaagtttggttgactaccagagaaaatacggtgcatcaaaagggggggagtctgccggcgtctccagggggacgaacaacggaagttcgacattgaagaaaaacgctaatatagagtcttatattattaagaattctggcgattttataacccccgaaaaagaaatttcaacaatcttgtccgcagcgataaagcagcgctggggattggatcttgatcccgataaaacgtttctggttacatttaaagataatggggaagacgaaaaagacgtcgtcgaaaaaataacactgacacaggcggcgctgaagaacaggcaagatgtaacgattgaggataatgagggttggtttcgaaaaattgccaaatatttttctccggtagtgtatgtttacaataaaattgacggctgggtcgaagaggcaaacagtcggcaaggtatttaccgggaaccgagtgctcagggggctgcgccttatacttcggatactcaggtatccatacccgttgatgattttaaaacattagtctgggatacagaccggactaaactgtataaaaatacccttgatagcttttgggacaagcacagcggctcatatacatcattgagtaaaatctcttttgttaaagcgatcaatctacaacgcttggaaggctcgcttaagcctgccgaggcagcactcgcccagcgtgcgttggggcctgttgcgcaaaaggaatggtccgagctgaccgcccaggattttacaatgcctgcggtcaaggacccggatctggatgtcggtctgctgagcatcaatggctttcagtccaccgacttgatgtgtgtgaccgaccgcaaaacccagctcacattgctttacatccctggcaattcctcgccgatccatcgcttcgacaatccggaacaaatgaaaacgtggctggccgagcaagccagggatcctgtaaagcgtgaatcactgttgacgcatttctccctcaaggaccaggccagaaggtcgttttcagacggtgtgcggcaaaccttggaagggatggccaattggtccgaagcgcaggcgtcagggaacgcgtttctttcggggctcaatggctgggtgccggatcgttttatcaccgttgatccattaagtggcgatccttttgaagcggtcaaggttcggcaaaaagagcgttcttactcggatgccgacaatgccattgtcagcgatggcgactacaccaagaacaagatactgcagggtgtggaagaggccacaaaggtcgcaatgttcatgacaccactggcgctggtcatgccggaagtagccatagggctggatattttcttcctggctgccggggtcacccaggcaggcatcggtattgatgatgtcgtcaaaggcaaagcgacgggggctgaccgtatcgtttttggcgtattgaacgccgtgccgccattagccactcatgcgggggcgccgcttgcgaaggtgctgacagagcgggtctccggggagggcattgttgcagggggtgatattgcagcccaggcgcccactcaagtcaccgaacaagggcggccaaacttcaacccgccacgacgtgtcaatggccagataggatacccgatgagccctgttgcgcctccgaagatcctcgaggaattcacgattccgatggacgatatccatcaaatgttctcgcaagactacatggtttttgtagatcagtacggtacaaaagttacgtatgacgtagaggcacgcctctggcgtgggctcaacgagaacgggcaagtgaatgacattttttattggcgtaaggggcaaggaaagtggctgagtggtactaaagcggaggcgactgccgggagtaaaagtgcaccggtttcgactattaataaaacactgaaagtaccgccactgccgtcgctgccttccgccgctacagaagtgccaaaagtcatccactatttttgggcaggcaatgagatgccagagcatttgctcgaaaatattattgagaactccaggaaaagcccggggtataagtctatcgttcacgtggatgccaataacgctggggcctttcagaagataaaatccgctctggatcaccgagtgggtgggcttgaagttcacgatttgaaagaagaggaggcttttcgagaactcaatgccggcaagtatggggagatgtatcagtattttcgctcaggacaagggcagaatttatcggcctcgtctgacgtcatgcgcgttgcgctgataaaaaaatacggtggtatttatctcgatactgacgatgttctgactaagggggtaggcgatgtcatgctgaaagccactccaaatgatattcttatgaattcgcccgttacttacgctgccacggacttcaatgggttcaatacaagtaattttgcgagccatcccgacaatcctttgctcgatacccttatggaagaatcttatcagcgatacaaggctaatgaatcctggttgcaggcaaatcgtccgttcctgcctgaggaagcgacaaccgcagagcaacaggcttataaagagtatgaaacaaagatttttgaaataaccggtccgagaatgtttggggatgtgctcgaacgagagaactacggtttctttccgattgtcgatgaaataaacgagctcttgaatgctcgtgttctccttcccgaaaattatgcaaaaaaatacactgagttgagagattattatatgccgatgaatcataagtttggggtttctatcggggcggagcactccatgcagcattctcgttaatgcgggtataggcttggcggcatgagcaataagtgagcgctggacgcttgaacgtggccactgattgctcatctggaaagtaatccagcttcgccaaagagaagggcatcgtctcgctctgacacctgggtgtcggggcgagcgatggcgtttcctgaggtgtgggcggggagatatggctaaattctattttgttattaataaattcttttttattccttattctgtttgaaggtcgtccctatactgagctgcaacgctaaacgttgcaggagggcacacccatgcacagcgagtcgattcgttatctgatcgtgccgggctggcaaggatcgccagaagatcattggcaaacccattggcagaacagcttgcccaacagcgcacgggtggagcaggccgattggctgacgccgcgtcgcgaggattgggtggcggcactggccgaggccatcgctgctgacagtacgccggttatcctgatcgcccatagcctgggctgcatcaccgtggcccactgggccgccaccgcacccgtgcagttcttgcgacaggtacgcggtgcgttgctggtggctccggcggatgtcgagcgccctgcgtgtgcccctgctctgcgcaatttcgcccctattccaactgacctgctgccatttcccagccaggtggtcagctccgataacgacagtgccgtgagcgcccccagggctctggaactggcgcgtcaatggggcgccgaagccggcatcttgtcgggcgccgggcatatcaatgtgaagtccggccaccggcgctgggagcaagggtttgcttacctctatcgcctgcaacatcgcctcgagcaccacgctcggcgcagcgcctaatattttttacaacgcccgtccctgagtggattggggcgggagcctgccatgagtctgcatgaaacctttggtcagccgctgctgacctttcccgatgctgaaaaaagcccgttgagcatccgcgccaaggcgctggtgttcgtcgacccacgctcacgccaactgcgtgaagagttggaaagccttgcgccgcgtgccttacccgtactgattcgcggagaaaccggcagcggtaaagaattgctggcgcggcacatccaccgtggcagtgaccgtactggcctgtttgtctcggtcaactgtggcgccatcagccccacctatgccgatgccgagttgttcggctatgccgccggtagccacagtggtgcggcgagcagccgggcgggatggttcggctcggccaacggcggcaccttgtacctggatgagattggcgacttgccgctgccgatccaggtgaagttgctcgcggccctggaaaaccacgaagtcacccgtgtcggtgcccatcagccgagcccggtggatgtgcgcctggtggccgccaccagcatcgacctggcccaagccgtggccgtgggcaagttccacgagcgtctgtttcattacttgagcgaaggccggctggacctgccagcgctacgcgagcgggtgggggatatcttgtccctggccgaatatttcctcggcatctacagccagcgcctggacctcccggtgccgctgatcagcgacgccgcccagcaggtgctggagcaacacacctggccgggcaatacccgtgaactggaaaacgtcattcactttgccttgctggtgagcagtggcgatgaaatcttgcccgagcatttgaacttgccggtggcgggttcgccgctggagcaagtacgacgaatttttgccagcgccagcccagccgagaaggaatcggtgcgtaaattcctgtatgagcaaaatggaatatcaacgtgaataaaagatattgttcgggaataaaaaatctaggtattgtcctcaccacgccgcgatagcacttcgctggcacctcacataaaaacggtcgttagaaggacattgcatgaaaaaggttctgttgtttaccgctctggcggctgccctgactgccggcttcgcccaggccaacgaaaagctggtggtggctgctacgccgatcccgcacgccgaaatcctcgagctgatcaagccgaccctggccaaggaaggtgtggacctgcagatcaaagtctttaccgattatgtacaaccgaacgtgcaagtcgctgagaaacgtctggacgccaactatttccagaccctgccgtacctggaaaacttcaacaaaggtaagggcaccaacctgattaccgtggtgggtgtgcacgttgaacccttcggcggctactcgaaaaagatcaagaaaattgaagatctgaaagacggcgccaccgtggctatccctaacgaaggctccaacagcggccgcgccctgttgctgctgcaaaaggccggtgtgatcaccctcaaagacccgaccaacgccttggccacgccgaaagacatcgccagcaaccccaagaacctgaaattcaaagagctggaatcggccctgctgccacgggtactggaccaggttgacctcgacctgatcaacaccaactacgccctggaagctggcctgaacccggccaaggacgcgttgatcatcgaagacgccaagtcgccgtacgtgaacttcctggtggcgcgcccggacaacaaggacagcgatgctatccagaagttggccaaggccctgaccagcccggaagtcaaagctttcatcgagaagaagtacaacggcgcggtggtgccagcgttctgatgtaagccaaaactccttcaaggtttcaacgccgacggctactacagcgtcggcgtttttttatctgaaatacattcaaaactgtgggagctggcttgcctgcgatagcggtgggtcagtgtcacatctgtacctgacggaccgctatcgcaggcaagccagctcccacagaggtaagttttttggtgatatggatatgctatctaggtatttaaactttgatttttatacctttaaagttcgcgctagctgacgttatccacgtcggcacggactgcgctcgcggcattacccatgcggcgatatggactgcacatgaccttcgatttcgcttttatcctcagcaccctgccggcgtttctcaaggccgtgggtgtgacgctgcaagtcggcctgatcgccattgccacgtccttgctggtggcgctgatcaacgctgcgctgctggtgtttcgcacgccttacctgtcgcgcctggtggcgttgtatgtagagctggcgcgtaacacgccgctgttgatccagctgtttttcgtctacttcgcgctgccggccctgggtttcaatatttccgggttctgggcggcgattatcaccatgacctttctgggcggcgcctacctcaccgaagtgctgcgcgccggtgtggaagcggtgccgctggcgcaaatcgagtcgggcaagtccattggcctgtccgactggcaactgctgcgccatgtgattctgccccaggccggtatcctcagcctgccggcgttgttcgccaatttcattttcctgctcaaggaaaccaccgtggtgtccgcggtggcggtgccggagattctctacaccaccaagagctacatcgccctctactacaagacctacgaaatgctcgccgtactgacgctgatttgcgtgctgttgttcctgccgttgtcgctgttgctcagccgcctggaaaggaggctccagcatggccagttcgggtcttgagttgctctgggtgtcgttgccgcaactgagcaagggcgctgcgcaaaccctgtcgatttcgtttttgagcatcgccttcagtacggtgggcggcgtgctctacggcgtgttgcgcaccttgaataacaaggcgatcaacggcgtgctgcgggtctacctggaactgtttcgcgccattccggtgctggtgtggttgtacctgctgttttttggcctgccgatcttcttcggcctgagcattccgagtttctggtgcgcggtgctggtgctgtcgttgtggggcgccagcgaggtgggcgaagtggtgcgtggcgcgctgcattcgttgccccgtggccagcgcgaagcgggcctgtcgattggcctgtccggcccacagttgtacggctatgtgctgctgccccaggccctcaagcgcatgacgccgccgaccatcaacgtgtacacgcgcatcatcaagaccagctccctggcggtgctgattggtgtggtggatgtgatcaaggtcggccagcaaatcatcgagcgcacctatgagtctgtattgatctacggtgcgctgttcctgtttttcttctttatctgctacccgttgtcagccgcctccaaggtgctggaacggcgctgggcccaagcatgagcgcattgatcgagttccagggtttcaacaaattcttcggcgagacgcaggtgctcaagggcatcgacctgagcgtgcaaagcggcgaggtggtggtgatcctcggccccagcggttgtggcaaaagcaccttgctgcgttgtttgaacggtttggaagtggcacacagcggcagtctgcggtttgcaggccttgagctgttggataaaaccaccgactggcgccaggtacgccaggacatcggcatggtgttccagagctaccacctgttcccgcacatgagcgtgctggacaacatcctgctcggcccgctgaaagtgcaaaagcgcgacccccgcgaggcccgtgagcaggcgcaaaaactgctggagcgcgtgggcctggccgacaagcgcgatgccttccctcgccagctttccggcggccagcaacaacgcatcgctatcgtgcgctcgttgtgcatgaacccccaggtcatgctgtttgacgaagtcaccgcggccctcgacccggagatggtcaaggaggtgctggaagtgatccagggcctggcccgcgatggcatgaccctgctgatcgttacccacgaaatggccttcgcccgcgccgtcgccgaccgcgtggtgttcatggaggccggtcgaatcctcgaacacaacacccccgaggcattctttacgaacccgcagaccgcacgcgcgcagcagttcctggagaagttctcctttgtttcaacactgcccaaaaagatcaaggaactggagctgatatgaaaaagttactgctgccactgtttgccgtcgccttgctggccggctgcgataaaaaggccgaagagccggtaaaacctgcggctgtgagctacatcgacaaaatcaaagcgcgggataagctgattgtcggcgtgtttacggacaagccacccttcggctttgtggacgaagccggtcgctatgtcggcttcgataccgacatcggccggcaattcgccaaggacctgctgggcgacgaaaacaaagtggaatttgtcgccgtggaaccggccagccgcattcccttcctgcaaagcgacaaggtcgacctgatcctcgccaatatgaccgtgacgcctgaacgcaaggaagcggtggactttaccaaccccaatctgaaagtcgcggtgcaggccctggtgccgaatgacagcgccgtcaaaagcctggatgacctggcaacccgtaccaccatcgtcaccaccggcaccaccgccgatatctggctgaccaagaaccacccggactggaagctgctcaagttcgagaagaactccgagtcgctgcaggcgctgtcggctggccgtggtgatgcgtatgcgcaggataatctggtgttgttcagctgggccaagcagaacccaggctaccgcgtgctggaagagaagctgggtgatgaagcgccaattgccccggcggtgaagaagggcaataccgagctgcgtgactgggtgaatgccgagctggcaaagttgggcgaggagaaattcctactcaagctctatgaccaatatgtgcgtaaagagctgagcgatgacaccaagcctgagagtgtgattgtggaaggcggtaagtggcagggctgagatagctatcgcaggcaagccagctcccacctttgaatgtattcacacatcaaaatgtgggagggggcttgcccccgatgaggccggtgcaggcaacgcctactccggccagtgccaggccggcgcatccagcatcccttgccccgcgacccgcgtttcccccatcaccttctccaacacaatcgaattacattcctcatcctgctgcaacgccgcaatcaaccggctggcatggctcaccacccacacctggcactgtttcgaggcctggataatcaagcgcgccagtgctggcaacaagtccgggtgcaggctggtctccggctcgttcagcaccatcatggtcggtggccttggcgtcagcagcgcggcgatcagcagcaggtagcgcagggtgccgtccgacagctccgccgccgacaacgggcgcagtaagccttcttgatagaactcaatggcaaagcgtccgccctgcaagggttcgatatgcaaccgtgcgccggggaaggcatcactgaccgcgtgctgcaacgcctcgacatcgcccacttcgcgaatcgtctgtaacgcggccgccagatcccgaccgtcgtgatgcagcaccggcgtgcgcgtgcctaattgcggctggcgtaccggcgcatccacatcgctgcgaaagtgatcataaaaacgccagccacggatgctttcgcgcagcagcaacacttccggcgaaccgcgcaggctgccgacctgatcgaacaggctgtgatagttgggcgtgtgctgggccagtacgtcccaggcgcggccatcacgggcgcgtaccatcgggcccgaacgctgcaccaacaggctggccgggcggtagagggggccggcccagatacattcctttttaatctccgggtccagtttgaactcgctgccgggaaccgggatgggcatgcccagggagatggcgtagctgaagtcctccccggcaaagcccaggcgcaagcgtttgacatcttgggcgaccacggcctccaccggtacttcgccattgcgcatgcgccggctgatgttttccggcccggcccagaatgtggaatccagcccgccttcacgggccagcgcattgatcaccccgccctgggcggtttcggccaacaggcgcagggcgcgatacaggttggacttgccgctgccattgggcccagtcaccaggttcagccggtccaggggcaccaccaatttgttgatcgagcggtaattggccaccgcgagggttttaagcatgtgtatttagtcagcgtgggaaccattggagtatgggatcctccatgcagataaggaaccctgatctaagctcacagtcgcatacacacttgaacgtcggcatcacgcaaaaggagcctgcatgggcggtcgcacctcgacatttattttcagccttggcctcctggcgctgctcagtggctgtggccaagacaaggccgagcccaagcagcattcacgggtgttcgtgcaaacggtgcagtcggcggattttgccgcggcggtcacgttgaccggtgatatccaggcgcgggtgcaaaccgatctgtcctttcgcgtgggaggcaagatcatccagcgcatggtcgacgtgggcgaccgagtaacggccaggcaagtgctggccaagctcgaccccaaggacctgcaaaccaatgtcgattccgcccaggctcaggttgtggctgaacaggcgcgggtcaagcagaccgccgccgccttcgtgcgccaggaaaaactcttgcccaaaggttataccagccgcagcgaatacgacgccgcccaggccgcgctgcgcagcagtcaaagtgccctggccgctgcccaggcgcagttggccaatgcccgcgaacaattgggctacaccgcgttgatcgccgatgcgccggggatcatcacggcgcgccaggccgaagtcggccaagtggtacaagccaccgtgccgatcttcagcctggcccgcgatggcgagcgtgacgccgtgttcaacgtgtatgagtccttgctggttgagccgccgcccgacgcgccgattaccgtcagcctgctggacaacccgagcatcaaggccgtgggcaaagtccgcgaagtcacgcccgccgtggccgccaataccggcaccgtgcaagtgaagatcgccctgcaaagcctgcctaagggcatggagctgggctcggtggtcagcgccaccgccaatggcccggccaaggcgagcatcgagctgccctggtcggccctgaccaaagacctcaacgagccagccgtatggctggtggacggcgagggcaaggcgcagttgcacaaggtcaccgtggcgcgctacctcaccggcaaagtgatcatcggcgagggcctcaacggcggtgaaaaagtcgtgatagccggtgggcaattgctgcaccccggcatggtcgtcgagatcgcccaacccggagcgcagccatgaagcaactgacgctcattgtcgccgtcagcctgttgctggtggcctgctccaaggaagaggcgccgcccgaacccatacggcccgtgctgtccatggaagtgaaggctgaagatcaggaaaacctcggtcgtttcgccggcaccatccaggcccgctatgaaagcaacctgggtttccgcgtgcctggccgcatcgcccgtcgcgccgtggatgtcggcgccgaagtgcagaaaggcgccgtgctcgccgtgcttgaccccaccgaccagcagaaccaattacgtgccgcccagggcgacctggcgcgggtacaggcgcagttcatcaacgcccaggccaacgctcggcggcaacaggaactgttcaaccgtggcgtcggcgcacaggctcaattggatgtggcccagaccgacctgaaaaccacccaggcgaccctcgaccaggcccgcgcctcggtcaatcaagccaaggaccagctcaactacgccgaactgcgcaccgaccacgccggcatcgtcaccgcctggaatgccgaggccggccaggtggtcagcgccggccagcaggtggtgaccctggcccgtccggacatcaaggaagccgtgatcgacttgcccgccggcctggctgaacgtctgcctgccgatgtggtgttcctggtcgccgggcaattggaccccagcgtgcacaccaccgccgtggtgcgtgagatcgagcctcaggcccaaagcgccacgcgcacccgtcgcgcacgcctgagcctggccgaaaccccgcccgcgttccgcctgggcacggcaatcagcgtgactttgagcaccgccatcgccccgcgcatcgaactgcccctgagcgccttgcaggaagtcgacggcaagacccgtatctggctgctcgatacccagagccagaccgtacaaccccgcgaggtcacggtcatcagtcgtgatgctcacagcgccttgctcaatggcagcgtcaaacccggcgagcgcattgtcaccgccggcgtgaacagcctgaaacccgggcaaaaagtcaaaatcgacgaggacagcccgcgatgaaagggagcttcaacttatccgactgggccctcaagcatcagtccttcgtctggtacctgatgttcgtcgcgctgctgatgggcgtgttctcgtacatgaacctgggccgtgaagaagacccgtcgttcaccatcaagaccatggtcatccagacccgctggccgggcgcgacccaggaagaaaccctcaagcaggtcaccgaccgcatcgagaaaaaactcgaggaactcgactccctcgactacgtgaaaagctacacccggcccggcgagtccacggtgttcgtgttcctcaaggacaccaccagcgccaaggccattccggaaatctggtaccaggttcgcaagaagatcgatgacattcgcggcaccttcccccagggcttgcaggggccgtcgttcaacgatgaattcggtgacgtgttcggctcggtgtatgcctttaccggcgatggcctgtcgatgcgccagttgcgtgactacgtggagcaggtgcgcgccgaaatccgttcggtaccggggctgggcaaggtcgagatgatcggccagcaagacgaagtgatttacctgaatttctccacgcgcaaactcgcggcgctggggattgatcagcgccaggtcgtgcaaagcctgcaatcgcaaaacgccgtgaccccggccggggtgatcgaggcagggcccgaacgcatctccgtgcgcacctccgggcagttcgcctcggagaaagacctggccaacgtcaacctgcgcctcaatgaccgtttctaccggctggcggatattgccgacatcagccgtggttatgtggacccggcgcggccgatgttccgcttcaacggcaaaccggcgattggcttggccatcgccatgcagaagggcggcaatatccagtcgttcggcaaggccctgcacgggcgcatggacgagctgaccgccgacctgccggtgggcgtcggcgtgcacaaggtgtccgatcaggccgaagtggtggaggaggccgtcggcggcttcaccagcgcattgttcgaggcggtgatcatcgtgctggtggtgagctttatcagcctcggcatgcgcgccgggttggtggtggcgtgctcgatcccgttggtgctggcgctggtatttgtgttcatggaatacagcggcatcaccatgcagcgtgtgtcgctgggcgcgttgatcatcgccctcggcctgttggtggatgacgcgatgatcaccgtggagatgatgatcacgcgcctggaaaaaggcgaaaccaaggaacaggcggcgacttacgcctatacctccacggcgttcccgatgctcaccggcaccctggtgaccgtggccggcttcgtgccgattggcctcaacgccagttcggcgggcgagtacacctttactctattcgcggtgattgccgtggcaatgctggtgtcgtgggtggtggcggtgctgtttgcgccggtgatcggcgtgcatatcctcagcgccaatgtgaaaccgcacaacgccgagccagggcgcattggccgggccttcaatggcggcatgctgtgggccatgcgcaaccgctggtgggcgattggcatcaccgtggcgctgttcgtggcctcggtgttttccatgcagtttgtgcagaaccaattcttcccgtcgtcggaccgcccggaaatcctcgtcgacctgaacctgccgcaaaacgcctcgatcaacgagacgcgcaaggccgtcgaccgcctcgaggcgatcatcaaggacgacccggacatcgcccgttggagcacctacatcggccagggcgcgattcgtttctacctgccgctggaccagcagctggaaaatccctactacgcgcaactggtgattgtgagcaagggcctggaagagcgtggcgccctgatcgcccgcctgcaacagcgcctgcgcgatgattttgtcggtatcggcagctacgtgcagccgctggaaatgggcccgccggtagggcggccgatccagtaccgtgtgtctggcaaagacatcgaccaggtgcgcaagcacgccattgaactggcgaccttgctcgaccagaacacccatttgggcgagatcatctacgactggaacgagccgggcaaagtgctgcgggtggacatcgcccaagacaaggcgcggcaattggggctgtcgtcggaagacgtggcgcagttgatgaacagcgtggtcagcggcgcggcggtgacccaggtgcacgacgatatctacctgatcaacgtggtcggccgcgccgaagatgccgagcggggcaccccggagaccttgcagaacctgcagatcgtcacgcccaacggcacctcgattccactgctggcgttcgccaccgtgcgttacgagctggagcagccgctggtgtggcgccgcgaccgcaagccgaccatcaccatcaaggccgccgtgcgcgatgaaatgcagccgaccgacctggtcaagcagttggcgccgaccatcgagaaattcagcgaaggcttgccggtgggctacaaagtcgccaccggcggtaccgtggaagaaagtggcaaggctcaggggcctatcgccaaggtggtgccgttgatgctgttcctgatggccaccttcctgatgatccagttgcacagcgtgcagaagatgttcctggtggcgagtgtcgcgccactggggctgatcggcgtggtactggcgttgatccccacgggcacgcccatgggctttgtggcgatcctggggattctggcgctgatcggcatcatcatccgcaactcggtgattctggtcactcagatccacgaatacgaagaggccggctacacgccgtgggatgcggtggtggaggcgaccgaacaccggcgtcgaccgattctgctgactgctgcggcggcgagcctgggcatgatcccgatcgcacgggaggtgttttgggggccgatggcttacgcgatgattggtgggatcatcattgcgacattgctcacgttgctgtttctgccggcgctgtatgtggcctggtacaagatccgcgagccgaaacaggattaacactgagagaggggctgccagttaagcgcagccccccttctgtaggagcgagctcgctcgcgaaaaacgtcaacgataacgcgtgcttcctgagtaaacgcggcgcctgtgagtttttcgcgagcaagctcgctcctacaaaaaagccttaactgactgaggctgtgtgaagcttctgaaaaatcccaacgtcgccctggctgaccattgcatgttgtaccctctggtccttattccaaacccaggtcgatcctcatgcagtgcctgcgtttcaccttgctgctctgcgcgttgctccttgcgccgcccaccttcgccgccaccgtactggaaaacgctttatggcgtgtcgagctcgaccccgccaccctggcgctgcgcgtgacacctgcgggccaagcctcggtgcaggcctccagcggtgtggctgcgcatgccgtcagccaattgcggatcacccctgaccaggccacttggcaatgggacaacggcgcctatcgcctgagcgcccgcctgcaacagcgcgacctggccctgaccatcaacgcccgtgagcccggtgagctggccctgctgcgccagcccgccgaggccatgggacgagggttgatctggcccttggccgaggggcattacgtgcctgccggcaatgccatctggaacgcgtttctgctggagcggggcgagttcaataccacccaggacctgagcctgccgctgtggggcgtggatcacgctggcttcaccttgaactggctattgaccaacccctacaacaaccgcctgcaatggcaagccgacggcaacggcctggccctctcagcttcccacgaattcaccccgctggcgcccgacgcgccgatgacactgcgcctgtccttgggcgatgccgatccgttggctggcgccaagcgctaccgccagtggctggtggagcagggccgctatgaaccgttggcggacaaactgcggcagacgcctgaagcccagaagctgctgggcgcaagccatgtgtacctctgggacaacggcctgctggctttgggtgatgtgcgtgattggccgaaactgatcaaacggctgcgcagccatgaactcaagacgctgatggacaaagagagcgcacagctgctggcgcagtccactcccttgaatcgctatgagcaaaccgtgctgctgcgcggcctcaacgcggcgatcaacaccaaggcccggcaggcctggcaggtggaagatcccgacatgacccgccttgccgctcgctatggtgagctgcgcagtgaactggccgtggactttgcgggggccttgagtgatagcccgcaaacttggggcagtagcaccattcaagccctgcgcgacgccgggctgcagcgtctgttgctgaccttgggcgaaggttgggagggtggcctctggcatcccgaagcgattcgcgcgggggtggatgccggttttctgatggcgccttacgactcctatgaaacggccctgtccgccacggaaaaccccgattggaccaccgcccacctgggcgccaaggcctatcgcgactgcgcgatcgtgctgaaagacggcaagctgaaaaccggcttccagaagtccggccactacaccgacccgcgttgtgtacggcctttgctggaggcgcgggtgaaagcggtacaagccaaagctggtttcaacgcctggtttctcgatgcctacgccaccagcatgctgttcgacagttaccgcagcgacgccagcatgacccaggcgcaaaacgccgaaggcaatatcgaagcctcccgctggataaacaccgtgcccaagctggtcaccggctccgaagacggcaacgccatcaccgcccagggcatcctgtttgcccacggcatgcagaccccggtgatcggctggggggatcctgagatgaccaaggaccaacagtcgccgtacttcgtcggcaactggtaccccacggagcaaccggcggtgttcttcaaatcggtgccgttgaaggagccgtttcgcaccgtgtatttcgagccgacgatgcgcctgccgttgtatcaggcggtgttccacggctcggtgatcaccacccatcattggctgttcgacagcctcaagctgagcaatgtgcaggtcgagaacgagttgacccaactgctctataacgtgccgccgctgtatcacctgagcacagctacactcaaacagcgcttgccggtgatacaacgccaggatgcctttttccgtgcgctacaccagcgtctggctactcaggcgatgatcgattttcgctggttgagcgatgaccggcaggtgcaacaaaccacgtttgccgatggtactcggctggttgccaacttctctgggcaaatccgtgagatcgctggggccacccttgatgaatacagcattaccgcgttcgaggcaggcgacaacgtaatgcagtatcgcgccggcaaccctctacattgagcgagggcacccttgccggtcaggaagggagtcatcctcatgtatatcaaatctgcgttgttggcattttgcttgctgattgtcatcgcgtgccagcacgagtctcctcaggctggcccacggcttctgatcgagaacgcctacatctttaccatggagccggaccagccccgtccgttcatgggctacctgctggtggatcaggccggcgccatcagcggattggccgccggcaaagcgccccccgggttagtggcgcaacgccgtattgatgcaagggggcaatgggtgatgccggggtttgtgtcggcgcacagccacctgtggcaaagcgggttctacgggattgccgcgaatgaaaaccttgaaggttggcttgcccggctttacggcgttgaagcgccaaagctggacgccgcgcagctctatcaactgacccggcgcggtgcgagccagtccctgcgcaacggtattaccacgatgttcaactttacctataccggggcggaccgcagcggcgaagtggaccgccaacaactgcgcggcgcgctcgacgcgggggggcgtgtgatacacgggttcaatgtacgcaccatcagcgaaagctggactcccgccatggcccgtgagcgtactgcggcattcctgatgtgggccgacgcgcaatctgaatcagggcgttatctgggcacgatgcttgccggcggcgctgggttcgtcgacgctgcggtcgggcaggcccaggttgaaggcgacctgatgcatgagttttctttgggcaaccagcagcactatcttgagtccgtagcagattccgcgggggagcgcgcccgttatccggtacttgaacaggcgggtatcatcgggccgcgcttgatctttggccacttcattcactccacacccgagctgactgctgcggcggccaaggcgggtgtcgccatggtctggaatccgatgtctaacggtcgcctggggtccgggatggcggatgtgctggcttatcgcgccgcgggcatgaaagtgggcatgggcgtggatggcgaagccagtgccgaccgagcggatcccttcgagaatatgcgcatgggcttgtatcaggtgcgcgccgtccatcaacgggcggccgcgatgcaagcctatgaagtgatgcgcatgcacacgctgggcagcgccgaggtgctgggggtggaggacaagctgggcagtctcaagttgggtaaacgtgctgacatgctcctggtggacccaggtagcttcactccctggcaggaaccttatgccgcgctggtgtttgcaggtggagtgaaagacattcgtgaagtctttgtggatggtctctcactggctcgctgatcaggcaggcttgcgccatacactcgccaaccaaggctgctgctcccgcggtaacccggccggccggtagtagtgctccagctcttcaaacccggcctcggtcagcaaggctcgccacgcctccagatcgtgataagacccataccgcggcccattccagccctcttggttctcgccccgagggttggagctgaacagcacgcctccaggtttcaacgcgccatgcagttctttgagcacgcgcggcagttcctgcttgggaatatgaaacagcaccgcattggcaaacaccccgtcaaagcgcgcagcgggcaggtccagcttgagaaagtcctgctgcagcacctcacagccgctgtcttcgcgggccatctgcgcaaaacgctcggagccatccaggcccacggcgatatgccccatgcgcgtaaacgtctgcaaatcccgccctggcccacagccgaaatccagcacggtaaacggcagcgtgccctggatatgccgcagcagcgcgtcgatgttctggctcacatcgtgatcgcgggtgccttcacggaagtcttcggccaccttgttgtaatggcccaaggtggtggcggtgatctgattgaggtcgtcgggagcaagtttcatggcatggcgcacggctgcggctgaagtaacgggactataccctggcccactcttgagttgaaaaccgtgtatccgctgtagggcgcttcatggcgttcgcagtgtgcgcatccgacagaccgccacggggaattgtgggtaagattcggccctcatttgcagagggctatacatccatggaagaggaaaaacgttcacccgttggcaacgacaccgcaccgaacaaggtcgaccaatacgccacgagattaagcaatgggctgttctggctcaatgagcgtgcctggccgctgacggtggggattctctcggtggcaggcctgtacctgtaccagtacatccagatggaaaaggtgccgctgagtatcttgtcggcgtcggcgttcaccgcattgccagcgatgttcgccatgttggtatttgtgatcggcatgatgggcgcatcgatcctggtgcccacgttcatcttgttcacgcgcctgaacggcacaggtgtgcgtctgagtgatcaactcaatctcagcccgcagtcgccgcaagagacggcccagcacaggaggttactgggacattggggggccagcctgttggtgatgtttgtgttctggatgtccgccgtatacctgtccgtgaacgccgaaagtgggcttttgctgacgctcggttggatcgtggcgatcatggcggcggtagtggcctatgtcggcatcatcattcgtgcccggcccgcccatgttgccctgcgtgagttgtccggcgagttctggctggccagtgctggcgccggggccattcaaatggtggtcattctgatggtgacggtgccggtctcccgcgccttcagcgagtactccgacagcgccgtgttctttgcgccgttcatggccgccgaaatggccgtgctatttctgatccaggggagcgccgcctgcctggtggtgcgcatgcgcgttcagaaaaacccggtggcgttcgcctcgttggtggcctttgcgctcatcgttttactcgggctgatcccggcgagtggggccaagttgggcggcctgccgctgcaaggctccgcctcgggagggcgggtttgtacgttgatgacctgggcggcagacgccaaggttctcggcgcgctggtcgacgccgacaaccccaagcgcagcgtaaaactgcgggtaatggccgactcggatggcagctacatcgtgcggccctggcaggccaaggaaaaaaccatcaccttcgtgccccgcgccagcgttgcccaactggatgagtgcccgtgagctagcgggtttccaggcgggcggagcccactgctctcacttcctgcatcgaacggttatcggttcgagagctgatccaagaaaaaccgttttccgcggctcggacagtgattgcgaagttctgtggcacaacgaatgtcggtgcagaagaaatgggagtggctgctgcattttcgtttacggtagcgaacagcacgaggacggccgacacgaagccgctggaagtcatgaggtttggcatgtgctgaatctcctaggtcgaatgtgtcgagtattaaatggtgtttgagctcgtaagcatccctttcagtaaagttttaccgccacagcttgaacgtcctgctcgctatcaacgttctgaccagcggcataattcccgctttgggaaacggccttgagcgcactgtttcggccaccgtcaattgcttcaaggcagctgtatttggcaggaatttcaccggaagcaggatgccagatacatccgactgtgtactgagcatcattagtcctgttcagagccaccgtgttgttgtcagcaatgctgaatgcctgggtccatgtgttcggtggaggctcaatcagctggataccaaatattccggcaggaggaatccacgtgaaatagctggtcctgccgtcgttatccttgcgctctaccagggcaattccgttgttattgattgcgcgtccatagttcatggttccgattgccagattcagagtcagcggagccgacgtgggtgtattccaggctgctgttcgggccgggttggcattggtgttgggatactcgcaaaagcctatggattgtagggcgttattgaggccagtgaccacgcaatggttggccccggtagcgaggggcaagggtgtcacggtataaccggtggcattcgcttgagctaacttgggaacggtagtgccgttgctgcccgggcagttcagggcaatccccggatagttgctcgtaagcgtgttgtttatgtcctgaggagtgcatgcgtcgttgtaccctgccaacccgagtagcgacgaaaaaacgcgcataggcgtgccagttccggcaagccacacaactgtggagtactctttgccgtcgctgctgatgcttgatccgagcatatcgccgcgctggttgaacgcgttgacggtggtccgtacatctgcagcacgcagtagtgtgccaggaagcggagcgagcgctgtaggagtgcttgtcggggtagtcacgttccagatcacggcggtatcgacattgttagcgttcttgcagatgccagcaatccagccaccgttggagacagcacttgcgtagcagggctgagtttccaccagtggtttcagtgctagctgtgcgttcggtgtgttcaggtttaccacccaaggcgcattgttagcgctggaatcgggcggcgagcagttgccgacagcaatagcgttgtcgttgatgctggtggtttcgcactgcccagccataggccccaatttgacgtagtgggcagcattggctgtcaatgcaagtacactcgccaacaggctgcccgcgattttcattaggtgtgttttgatcatcagtccgtccttggggaaacattcacggtctgattagatatacaaagaacatggccaacaactgtcatagttgacaggtatgaacgcgcactcagcgcttgttcaatacccgcgccaatcggtccccgctcagttggatcaccgccaccagcaccaccagcagcacaatcaccgtgagcatgatctgcgtatcgaagcgctggtagccgtagcggtaggcaatatcgcccaggccaccggcaccgatcgccccggccatggccgatgagttgatcatggtcaccagggtgatggtgaagccgccgacgatgccgggcagcgcctctggcaacagcacatgccagatgatgtgccagcggcggcaacccatggcctgagcggcttcgatcaggccatggtcgacctcgcgcaggctcacttcagcaatgcgtgcaaagaacggtgtggcggcgatggtcagcggtaccactgccgcccagacgccataggtggtgccgacgatcaggcgcgtgaacgggatgagcgccaccatcaggatcaggaacggtatggagcggaacagattcacgaacgctcccagcacgcggttaagggccggtgcctggtagatgccgcccttgtcactggtgactaggaacactgccagcgggatgcccaccagcagcgcgatcagcgacgacacccccaccatcaacaaggtgtcgatggcgccctgcactaaacgatcaaaccacatagcccagcacctccacctgttgtgcccaattggccgcacgtttgcgcagctcttcgccgttgtgcggcgatgcattcactgccagcagcagttgccccaaggcatgcccctggatgcgttccacgcccccatgcagtaaacgcacgcggccgccgagggcactgaacagcgccgcgaggtctggctccagggtatcgctgccggtgaactgcaagcgcagcaccagcgcggcgtcggccgaggcgggcgagggttgcaggcggcgttgcaactctggcggcaaaccgtgttgcagtggtgcgagcagggtcttgctgatctcatgttgcggatcaccaaacacctgccataccggcccttgctcgacgatacgcccgtgctccagcaccaccacgcggtcgcagatgtcgcggatcaccgccatctcatgggtgatcagcacgatggtcaggcccaggcgctggttgatctcgcgcagcaggccgaggatcgactgggtggtctccgggtcgagggccgaagtggcttcgtcgcacagcagaatctcggggtcgtgcaccagcgcgcgggcgatgccgacgcgttgttgctgcccgccggacagctgcgccgggtacgccttgtgtttgtcttgcaggcctaccagttccagcagttcatgcacctttcgcgcgcgttgtgcctgggacacaccggcgaccttgagcggcaactcgacgttctgccacacggtcttggccgacatcaggttgaagtgctggaagatcatgccgatgcgtcggcgcagcgccaccaggtggtcttcatcgaagccgccgatgtctacctggtcgatcagcacccgtccgctgctgggttgttccagacggttgatggtgcggatcagcgacgacttgccggcgccgctgcggccgatgatgccgaacacttcgccacgctggatcgccaggtcaatgccttgcagcgcatgcaccgtgccgtcataggttttgcccaggttgatgaaccgcacatgggcgcggttcaagtccgggtgcagttcagtctgttcggcgtggctgggcgcgtgctccaggtcacgcaagcgggcgttggcggcactcatggtttagcttcccagccgacctggtagagcttgcccagggacttgtccagggcagcgcgcactacaggcgagtgctggtagatatcgacgaacttgatcacccgtgggtcggttttgcttttgggctggatgacgaactgaatcacgtattccgggtggtcgaggccgtcgaacaacagcgccgactcggcatcgaaggtcttggacaggcggatatacgccgggtagccctgcaccagatcggcgtcgtcataggcgcgcaccagttgcacggcttccacttgcaggatcttgatgtttttcgggttggcgacgatgtcttcctcggtggccttgtagcccacacccggcttgagggtgatcagcccggccttggccagcagttgcaggccgcgaccgctgttgatcgggtcgttggcaatcgccacgctggcgcctgcgggcagctcgttgaagctcttgtactttttcgagtacagcccgacgttgttgatgatccctggcgcgtacggcaccaggtcaaacccggcggcggccttggcgttttccaggaagggaatgtgctgaaagtagttcacgtcaatatcgccggcggcgaggctgacgttgggcgcgatccagtcggtgaactccaccagctcgaccttcaggccctgcttgccggcctcttctacggcggcttccagcggtatggcgaaggcggcggtggtgccgactttcagcggggcatcggcggcgaataccgccgagctgaataagccgaaggccagggccagtgctttgactgggtggtttaagaatgtctttttcatagtggttttccagtcataaggtcttagatagcgagatcgttcccacgctccgcgtggtaatgcagccagggacgctccgcgtccccaaagcgaacgcagagcgtccaagaggcattcccacgcggagcgtgggaacgatcaaacaacgtggcggtaggtagagccggtgtgttgtttgggtaagcgggccgtgtcgtggaagactttttcccgcagcgttcccggcgcatattcggtcttgtacgagccccgtcgttgtaactccggtatcaccagctcaatgaaatccacatagctctccggcgtcacaatgcgcgtcaggttgaaaccatccagcccggtttcgctgatccaggattccagctcatcggccacctgttcaggcgagcccaccaaggtgatatagcgcccgcccaaggcgtgctgttcaagcaatttgcgccgggtccagtcgttgttctgcaggttctgggtggccgactggatcgcgttgcttttgacgtactgaatcggttcgtccaacgcgtactgggcaaaatcgatcccggtcgaggccgagaagtgcgccacgccggcttccgcgctggcgtagctcaggtactcggcgtgcttggtccacgccagctcttcggtggcgcccacgatcacgttgaggcccatgaacaccttgatgtcatccgggttgcgcccagcctccaccgcgctggcgcgcaccttgtccacctggcgcttggtcgcgggtttgttctgcccgctgataaacacgcactcggcatgttgccctgcgaacagcaagccgcgctcggaactgccggcctggaacagcaccggcgtgcgctgcggcgatggctcgcacaggtgataaccctccacctgatagaactcgccgtggtgcgcaaccttgtgcaccttgcccggttgcgcatacacccgcgcctggcgatcgttgcgcaccgcgtcgtcttcccagctgccttcccagagcttgtacagcacttgcaggtattcatcggcctggtcgtagcgccggtcatgctcgacctgttcggtgaggcccatggccttggcggcgctgtcgaggtagccggtgacaatgttccaacccacccggccgcggctcagatgatccagcgtcgacatgcgccgggcgaacaggtacggcggctcgtaggtgaggttggcggtaaggccgaagccaaggtgctgggtgacggcggccatggccgacaccagcagcagcgggtcgttgaccggtagctggatcgactccttgaggggcacgtcaatggagtcctgatagacgtcatacacgccgacgatatcagcgatgaacaaaccgtcgaacaacccgcgctccaggatcttcgccagttcagtccagtattcgagggtcttgtactcggtcgagttgtctcgtggatgagcccacaaaccgtgattgatgtgcccgatgcagttcatgttgaaagcattgagcaggatcttttttttgctcatcagatggtcccccgcagcggcgggttttcatcgttgaggtagtagttgccgaccgcatggtatttccagcgcaccgggtcgtgcagggtgtgcacccgggcgttgcgccagtggcggtccaggccatgctcggccagggtcgcctggctgccggccagttcgaacaaggtgctgccggctgccagggaaatctctgtgctcagggcgcgcacttcggcgacggcgatggaggctgcggcgacggtctgggtattgctgtcggcctgggcgcgattaaggaattcacctgcgcgctccagcaaggcttcggcggcgtgcaggcggctgctcaggtggccgaagctcttgagtgtcagcgggtcttcggtggctttgtcgttgccggcgtcgatccacgggcgggtcttggtgcgcacaaaatgcaaggcgtcctcaaaggctgcgcgggcgatgccggtgtcgatggctgcgtggagaatctgcgccagcgggccgacggtggtcgggcgttcgaacgcgctctggaacggcaccacgtcttgcgccgcgacccacacgttgtcgaacaccaccgaaccgctgccggtggtgcgctggccgaagccgctccagtcgtcgatcaccgtcaggcccgcgctgtcacgcggcacgaaggccagttgctgcacgccgtttgcatccaccaccgaggtggggatgcgctgggcatagatcgccccggtggcgtagaacttgcgcccgctgatgcgaaaaccatcgccgtcgcgggtgaggctggtgatgcggtcatgggcggtcttggtgcccagttccgccaaggcgttgccaaagcgttggccggccaatacctcggcgtacaggcgttgctgctgttcggagctgccgttcacgcgcagtacttcgagggcatagaaatggttttgcggaatctggcccaacgagccgtcggcctgggcgatcagtgcgatgaccttggccagggtgacgttggacactcccgcgccgccgtaggccttgggcacgctgatgccccacaggccagagcgggaaaacacgtccagttcgggcaatggcaggcggcgttcgcggtcgcgttgggcgctgtcacggcgcaagtcttcagcaaggtcgctggcgacaataagcgcttgttcgtcgctggtgatgaccgcgacggggtgagaaagggtcatgagtttctccagaagctcgtggaaaaagtgttctggttggttaaatccaggaatgacgagccggcaaggtgccgttgagtcgataggcgccgatggcgtggtacttccagcgcaccgggtcgtgcagggtgtgcacccgggcgttgcgccagtgacggtcaaggttgaattcggccagggtggcgcggctgccggccagttcgaagagcttctcggtgacttgtaacgccacttcggtggtcagcaccttggcctcggccacggcaatcgaggcgtgggcggcggattgcgcggtgatcggcgcggcgctgacctggtccagcacctggcctgccttgcgcagcagggcttcggcggcgtgcagttcgatcttcagcttgccgatatcggcgatcacatacaggtcgtcgctggctcgctcgaccttggcgtcgatccacgggcgcgaacgctcacgtacgaaggcgatggcatcgtcgagggcgccccgggcgatgccggcgtctatggcggcctggatcagttgcgacacggccccctggatattcgggctttcgcccaggcgccagttgtcgatgaccagttccgtgtccactgccacgcggtcaagcaagacggtgccgctggcggtagtgcgttggccaaagccggaccaatcatcaacgatgcgcagcccttcgctgccgcgacgtacaaaggccatgacctgcttgccgtcatcgttcagggccttgattgccacccagtgagcgaacagcgcgcctgtggagtagaacttctggccgctgagcacgtaaccgtcgccttcggccgtgaggcgcgccttgagctcaagggtatttttggtgccgcgttccggtccgccgttgccgatgcgccagccgtcgagcacgctctggaacagctgctttttctgacgctcggtggcggtgccctgcaatacgtgcaagatgccgaaatggttctgcgggatctgcccgagtgccgggtcggccgcgctgatgatcgcgaagacttcggccagggtcacaaacgacacctgggggccgccgtattcacggggaatggaaatactgcccaagccgctgcgggtgaattgttcgagctgcgcccagggcagtttgcgttgctggtcgcgctgggcggcctgcgcacgcgcagcctgggccagctcgtgggcggcgctcagcgcctgggcgtcgttgcgcagcaccgtggcgggcaacagcaggggggctacgtccagatcactctggggggatgttagagccaagttagacatcagcgccgctccttggctgcacgcaatgccctggcgttgtgcaccggggtaattctgaccataccgacctcgcattcaatgaaataaacagaaaaatcaggaatgtccggtggtccggtgcatataccctaagcgtgttaattatttaaataaactaacttttaggaatatgcatagaagggctcaccccggttcacagggtgagccgaagcgacgcggttgatagcccggggcgggcgaggctgggcagggagtaggtgtgcaggcggcgatgcgcagcgtacgggcgggcgcccagcgggagttgttacccacgcggtcgagaatgcagtaggtgacctccaatcggcagtcgtcgccggcttcgacaatgatgtggggcggcacccacacctgcaccgccaggccgacgccctgggcctgtatgcggggcaggtccaggcgtacatcgccccagcgcaaggtgatggcatcgcccgtgctcatgttcaggtaaggctcgatggtcagcggaatgccgcgccttacctggctgctgttgacgccatggcggcggatcgtctcgggcaggttcacgggcgccaggttctggttttcatcgctgccctccgggttcaggcgcggcgaaggctgaccgccggggtagctggtcttgacccgcaccagggtcaccgccgagcgcatcgggccatggccgatctgcaagacctgataatggacgcgtgccgggccatcctgcacaaagctctgcggtacgcacaggtgggtataggtgccgatcttgcaagccgtcaccttacgcgaggcagcaaagcagttgttccagaacagttcaatcaggtcaccttcttccatgctcggatagggcgagatatcgacctgcaaatgggcggacgccagggcgctgatgccgtttccaatagcctggggcagccttggggcacggagcgtggccggggtttgagtgtgtgtcataagtaatctccttgatgcagccagcagcaatcgttccgaagcctcgacgcacaggcgcaagggggttcgaaaggcacgattcagtcagtagccgggatgggatccaatcctcaaggcgctagataagagggttggccagggagcgtcaatggaggcaaagggcttaacggcgggtttggagaaattcagaagggtctgacggggcgggggattttaaggcgcttacgacgggggcttttacgcgctcaacctgcaaccccttgtaggagcgagcttgctcgcgaagaacgtccaggcaactcggtcaatctgattcaccgcgttatcgttaacgttcttcgcgagcaagctcgctcctacattgggaggtgtcagtgggcgaggaatttgctcaggaattgcttggtacgttcttccctggggttggcaaacagcgccttggcttcgccctgttcgacgatcacgcccttgtcgaaaaagatcacccggttggctacatcacgggcaaagctcatctcgtgggtgacgataaccatggtgcggttttcttcggcgaggctgcgaatggtcgccaatacttcgcccaccagttccgggtcgagagccgaggtgggttcgtcgaacaggatcacctccggctccatggccaatgcgcgggcaatcgccacacgctgttgctggccgccggacagccgcctcgggtaagacgcttccttgcccgccaggccgaccctggccaacagcgtgcgccccagttcggccgccgcttcccgtggcatcttcttgaccacgatggggccttcgatgacgttttccagcgcggtacggtgggggaacagattgaagttctggaacacgaagcccacatgctgacgcagacgccgcaccaggccctgttgctggttgagcggcctgctgctgtcgatctcgatgtcacccaccttgatacggccgctggtgggctcttcgaggaagttcaggcagcgcaggaaggtggtcttgcccgaaccgctggggccgatgatggcgaccacttcgccttccttgacctcaaggtcgatgccgttgagcaccacctgaccattgaattgtttggtcagtttttcaaccacgatcatgcttcaagactccaggtcatgccggttgacccggtcttccagacgattttgcagatgcgccaggatgctcgccaggatccagtagatcagggccgcggacagatacatggtgaagatttcgaaggtacgtgccgacaccagttgggcctggcggaacagctcgggcacctggatggtggcggccagcgccgtgtccttgaccagcgaaataaagctgttgcccaaaggtggcaacgccgtgcgcatcgcctggggcaggatggcccggcgcaacgtttgcgctcgggtcataccgatactggcagcggcttcccactggccacgctcgatggaggcgatggcggcccgcaggatttcacaggcataggcggccatgttcagcgaaaagccgatcatggcggccgggatcgggtccagctcgatgcccacttgcggcaagccgtagtagatcaggaacagctgcaccagcaacggcgtgccgcgaaagaacgacacgtagacccgggccgtccagctcaagagcttgaagcgcgacaggcgcatcaaggccaggccgaagcccagcagcaggccgaaaaacatcccgcccagactgaggattaccgtgtaatacgcgcccttgagcagaaagggcgcggagtccagcgcgagttggaaacctgcttccattattgcgtgacgtcagcgttgaagtacttctcggacagcgtcttcaaggtgccgtcggcgcgcagtttgtccagagccttgttcaccgcgtcgagcaattcaggctcgcctttgcgcagggcgataccggattcctgacgggagaaggcgtcgccggcagcggcggtgtcgggggctttcttggcgtattccagggcggccaggcggtcgatcaggatggcgtcgatgcggccgatacgcaggtcttggaacttggtcgggtcgtcgttgtaggtcttgataatagctttaggctggttgtccttgagccattgttcgtagttggtgcccaggcccacaccgactttcttgccggccaggtcgtcggctttcttgatcgagtcgacgttctttttcagcaccagcgcctggatgccggacacggtgtaaggcttggagaaatcgtattttttcttgcgctcttcggagatggttacctggttgaccacagcgtccaggcgcttggattccagcgcggcgaggatgccgtcccatggcgtggcttgcagcttgaccttcacgcccagctccttggccagcgcctcggacagttccacttcaaaaccgctgagcttgccgctttcatcgacgaagctgaacggagggtaggtgccttccaggccgatcttgatctcgccggccttcttgatagtgttcaactgctcgccggcaaccgcctggcccagccagccagcgccaagcgccaggcccaaagtgccaaccaacagcgtgcgacgaaatgcagaaatagtcatggagagcccctgtgtttttatgatgagcgaagcaggtgacgcggtagtcgtatcctgccctaaagtgcgaagcgcgtcttcgccttcggcgctatgttaagacgggtttttaagtcttgaaaataataaaaatacaatttcatattctttttggaaatatgtgcggcttgtgtaggagctggcttgcctgcgattgcagtgtgtcagtgccaagtttctggctgacccaccccaatcgcaggcaagccagctcccacatcgaccgtattcaatcagttgaaaactgagtcataagcaaacaacgccggcgcgccaccggtgtgcaggaaaataatcggcccctcttcaaagcgctggcgcccgatgccgtcgagcaaaccggccatggccttgccggtatacaccgggtccagcaacagaccttcctggctggccaaaagtttgatcgccgatagggtgccagcgtttggctcgccataacgcggcccgaaatacttgtcccacagggtcaccttaaaggcttcgggaatagccacaccgagcaactcggcggtgcgttcggccaggccctgcaccttgggtaattgcgcttgctcggtgcgcgacaccgtgatgccgatcaccggcaactgcggcaatgcttcgctcaaggccagggccaggccgctgtgggtgccggcgctgccagaggcaagcacaaccgcggcgaattggatgccgctgtcttcaatctgcgcggccaactccagcccggcgcgcacgtaacccaacgcgccgagggcattggagccgccgataggcaccaggtacggcttcttgccgttgctgcgcaggcggtcggcgagggcgttgagttggtcgtcgacgttgtcgaggttttccaccagttccactttggcgtcgaacagctccagcagcaggcgattgccgttgccaaggtagttggggtcgtcggtgccggtagggttttccagcagggcaacacagcccaggccgagcttggcggcgagcgcggcggtctggcgcacatggttggactggatcgcgccagcggtgaccaaggtgtcggcgccctgggcaagcgcgtcggcggccaggtattcgagtttgcgcagcttgttgccgcccatggccagcggcgtggtgtcatcgcgtttgacgtagatgtccctgcccagccaggccgacagccgctcgagtttttccagggcggtggcattgcccagtagttccaggcggtcaaaacgggcgagctgttgtttgatcatggttacgcacggtggctgagtgatggggggactataggcaggcacttttcatcgggcaaccgtcaatcgcttatgacgaaaggttcttatgttcacaccattggttcttaagagctgcctgggtgcataccgtaaagtgatggccatttcgtcaggagtgaataccgtgagtgagcgttccagtcattggcaattgcagaccatcgtcagccagctgcgcggcgcccgcgaccagtggcgaacgcgcaatgggcgtttgagtggcgagcatggtggccgcgagttgccgtcccgcgaggcggtggcgcagattcttgaggccttgtgcggcgccctgtttccgatgcgcctgggcccggcggacctgcgcgaagaaagcgaagacttctacgtgggccataccctcgacgtcgcgctcaacgccttgctagcccaggcgcgcctggagctgcgctatgccgcgcgccagggcggtgaggatgacagtgaagtcagcgcccaggctattcgcctgatccaggattttgccctggcgttgccatccctacgcagcctgttggacaccgacgtactggccgcctaccacggcgacccggccgcacgcagtgtggatgaagtgctgctgtgctacccgggcatcctggcggtgatccaccatcgcctggcccaccacctgtaccgcgccggcctgccgctgctggcgcggatcagtgcagaaatcgcccactcggccaccggcattgatatccaccccggcgcgcagatcggcccgagtttctttatcgaccacggcacgggcgtggtgattggcgagacggcgatcatcggcgagcgcgtgcgcatctaccaggccgtgacactgggggccaaacgctttccggcggatgaagatgggcaattgcagaaaggccacccgcgtcaccccattgttgaagatgatgtggtgatctacgccggggcgacgatcctggggcggatcaccattggccagggttcgaccattggcggcaatgtgtggctgacccgcagcgtgccggccggggcgaatatcactcaggcgaacttgcagcatgatgatggggcgcagaagtaatacctgagtagacacccatcagtgtgggggctggcttgcctgcgataggtatcagtcaaaggaagggcggctgacccaccgctatcgcaggcaagccagctcccacatttagaatgtatttcaacgtggggtcgctgaacgatttgcctccttcatccgtcataccaatccctgagctagtgtaggaaacacctaccactcagccccgagattagtcccagaccgcctattcatgtttaacttgaacgttcgttcaagttaaaccggtggttcgctgcccgctcacaacaggaggcttacctttgctgagtccgttttttacagccatatcccgcaaccttgaggtgcatcgttcatgagtgcatcgtccaccccttccagcggcatggtgcgcatgaatgcgcccgttttctactttgccgcgaccgtcatcctgctgtttggcatcactgtcatcgctatcccgcaacaggccggtgcctggttgctggcggcgcaaaactgggcggccaacacggtcggctggtactacatgctggcgatgaccctgtatctggtcttcgtggtggtcaccgcgctatcgggctacggcaagataaaactcggtgccgaccacgacgagcccgaattcagttacctgtcctgggccggcatgttgttcgccgccgggatcagcatcacgctgtttttcttttgcgtctcggagccgctgacgcacttggtgcagccgccccagggcgaagcaatgaacgccgatgcggcgcgccaggccatgcaggtgttgttcctgcattggggcctgcatggctggggcgtgttcgcgtttgtcggcatggccctggcgtatttcgcttaccggcataacctgccgctggcgttgcgctcggcgctgtacccgctgatcggcaagcgcatcaatggccctatcggttacgcggtggatggctttggcatcattgccacggtgttcggcctgggtgccgacatgggctttggcgtgctgcacctcaactctggcctggactacctgtttggcattgcccatacccagtggatccaggtgggcctgattacgttgatgatgggcgcggcgatcatcgtggccgtggccggcgtcgacaagggcgtgcgggtgatgtccgacatcaacatgctgctggcctgtgcgctgctgctgttcgtgttgttcgccgggcctacccagcacctgctcaacaccttgatccagaacatcggtgactatttgggcgcgttgcccaccaagagttttgatgtgtacgcctacaacgagccgagcgactggctgggcggctggacggtgttctattgggcctggtggatcgcatggtcgccgttcgtgggcctgtttatcgcgcgcatttcccgtggccgcaccatccgcgaattcgtgtttggcgtgctgctgattccgctgggcttcaccctggcgtggatgtcgatcttcggtaacagcgccatcgatcaggtgctcaaccatggcatggcagcactgggccagtcggcgatcgatgacccatcgatgagcctctacctgctgctggaaacctacccgtggagcaagaccgtgatcgcggtcacggtgttcatcagctttgtgttcttcgtgacctcggctgactccggcactgtggtgctctccaccctgtcgtccaaaggcggcaacgctgacgaagacgggccgaagtggctgcgtgtgttctggggcgcgatgaccgccttggtcaccagtgcgttgctgttcgccggcagtatcgactcgctcaagtcggcggtggtactgacctcgctgccgttctcgctgatcctgctgctgatgatgtgggggttgcacaaggcgttctacctggagtcgcaaaagcagattgcgcagttgcattccctggcgccgatctccgcttcgcgcaaaggccgaggtggctggcgccagcgtttgagccaggcggtgcatttcccatcccgcgatgaggtataccgtttcctcgacaccacggtgcgcccggcgattgaggaagtgaccgcagtgtttgtcgagaagggccttacggtggtgacccagcccgacccgtccaacgacagcgtcagcctcgaaattggccatggcgaagaacgcccgttcatctaccaggtgcagatgcgtggctacttcacaccgtcgttcgccttgggcggcattggcaagaaagagatcaacaaccgccgctactatcgggccgaagtgcacttgagtgagggcagccaggactatgacctggtgggctacaccaaagagcagatcatcaatgacatcctcgaccagtacgagcgccatctgcagttcttgcacatggtgcgctgatagcgttcctctcaagtaggtctttgctgtaaaaggaagacgcagacttaagcgattcagctgcttaaaaggcccgggaatatgcctattcccgggccttatttgccctagatcaagagaggattcgatgacgtacattgctgccgaaaaccgctatgaatctattccttatcgccgcgtaggccgcagtggactggtgctgccggcactgtccctggggttgtggcacaactttggcgacagcaccccgatcgacacccagcgcgctttgctgcgcaccgcgttcgacctgggtatcaaccacttcgacctggccaacaactacggcccgccctacggcagcgccgagatcaatttcggtcggttgctgcgcgaagacttcaagcactatcgcgacgagttgatcatctccagcaaagccgggtgggacatgtggcccggcccttacggccagggtggcgggtcgcgtaaatacgtattggcgagcctggaccagagcctgcaacgcctgggcgtcgattatgtagatattttctactcgcaccgcttcgaccccgacacgcccctggaagagaccgccagcgccctggccactgccgtgcaacaaggcaaggcgttgtacatcggtatctcgtcttactccggggttaaaacccgcgaaatcgcagcgttgctcaacgagtggaaagtgccgttgttgatccaccagccggcctacaacctgctcaaccgttgggtggaaaaagacctgctggacaccactgaagaactcggcgccggggtgatcgccttcacgccgctggcccagggtttgttgaccgataaatacctcaacggcgtaccggccgatgcgcgggtgaaccgtccgggtggtggctcgttgcaggcccagcacctgtccgaagccaacatcgcccatgtacgcggcctgaatgaaatcgccaagcgccgtggccagagcctggcccagttggcgctggcgtggacattacgtgatccacgggtaaccagtgcgctgatcggcgcgagccggccggagcagattatcgaaaacgtcggggcgttgaagaacttgagcttcagtgcagaagaattggcggagattgatcggtttgcgcaggaaggcgggatcaacttgtgggaaaagccatccaccgccgaataaccttgaaaaagcaggccctctgatcgttcccacgctctgcgtgggaatgcagccccggacgctcggcgtccgctttaaagtcgtgacgcagagcgtcacaggaggcgttcccacgcagagcgtgggaacgatctgtcgccaagcgttagaacggcacatccccaagaatcgtcgcccggtgcatcacccgccgctgcggccggtagtcatccacggcgtaatgctgggtgacgcggttatcccagaacgccacgtcattctcctgccagcgccagcggatggtaaattccgggcgggtggcgtgggcgaacagcagcttgagaatcgcctcgctttcggccggttccagttcattgattcgggtggtgaagccatcgctgacgaacagcgacttacgcccactcaccggatgcgtgcgcacgactgggtgcgatagcggcgggtttttcttgcgggttgcttcccagcgcacaaggtcttcggcggtgttgccaaagcgctccagcgggaacgatttggtgaaatcgtgtgtggcggtgaggccatcgagcaagcgcttcaacggctcggacaacgcctcatacgccgcaatcccactcgcccacaaggtatcgccgccgaaggctggcagcagcttggcgctgagcacagcgcccagggccggcgtgggcaggaaggtcacgtcggtatgccacaccgcgttatcacgcacatccgtgacggcggtgtcgaggatcagcacttcgggctgttccggcacgttggggtagatcgggtggatgtgcaggtcgccaaagtttgccgcgaagcgtgcctgttgctgcggggtgatcggctggtcacggaagaacagcaccgaatagtcgagcaacgcctgttcaatggcctcgcgctgttcagggttcagcggctgagtgatgtcgacgccactgatctgggcgcccagggcggtgcttaatggggtaatggtcaggctgctcattgtggattcttcactcagtgtgcctggccatgccagggcactaatttacgctgcagggcgcgcaggcccatttccatggcgaaggcgatcagggcgatcaccaggatccccagcaccaccacatcagtgaccagaaactgcgccgccgactgcaccatgaagcccaggccgctggtggcggcaatcagctcggcggcgaccagggtcgaccagcccacgcccaggccgatgcgcacaccggtgaggatatcgggcagggcgctgggcaggatcacatggcgaatcagttgtgcgcgggtggcgcccagcgactgcgcagcccgcagcttggccgggtcgacggtgcgcaccccggttgcggtcgcgatggcgatcggggcgaaaattgccaggtaaatcagcagcaccttggacagctcgccaatgccgcaccagatcacgatcagcggcaggtaggccagcggcggaattggccggtagaactcgatcaacggatcgaaaatgcctcgggcaatgcggttggcaccgatggcaatccccaccggcacggcggtcagcaccgcaaagcccaggcccaggccgatgcggctcaggctagcgcccaggtgctgccacaaggtggaatccatgtagccggtggtcgccagcagccagcctttttgcaacacggcggacggtggcggcaggaacaaaggttcgatcaaaccggtggcggtcaccgcccaccacaaggcaagcagagcgaccagggtcagtacgctgatccagcgcgtgctcaggctgcggcgtaccgggataacggcaggtgccaccggcttgttggccgtggcgggaagttcgtagctgctcatgcgtacacctgcctttgggagaacactttgcccagcacgtgttcgcgggtttcgataaagcgtgggtcggacttgatggcgcgggccgattctccggcggcataccgttggccgaagtccagctgcaaccgctcaacgatctggccggggttgggcgcgagcaagatcaggtcggtggcgagaaataccgcctcttcaatgtcgtgggtaatcaggaacaccggcttggccgtgcgccgccacacttgcagcagcaactcctgcatctgttcacgggtgaaggcatccagggcgccgaagggttcgtccatcagtaatacgcgagggtcggccgccaaggcgcgggcaaggccgacgcgctgtttctggccgccggagagttgccagatgcgccggctgtcaaagccggccaggtccaccagtgcgagcatttcacgagcgcacacatcgcgctgcgccttgggcacgccggccagttccaggccgaaagccacattggccagcacgtcctgccagggcagcagggcgtcgtcctgaaacaccacgccgcgctcggcactggggcctttgaccggcacgccatcaagggtgatacgcccggcagacggttcgacgaagccggcaatcaggttcaacaacgacgtcttgccactgccggacgggcccagggcaaccagcaactgctggggcccaagctccagtgaaatatcggacagtaccggttccggagcgcctgggtactgtgcgctgatgcgctccagttgtagcaaggccatcgcagtgaactcctgggtcagttggtgatgaacttggcgctgacgtaaggggcgtagtcgggcagcacggcatcgaccttgccctgttccttgaggaacgcagcggtgtcggtgacagccttggtggtcggcgcgcccaacagggttacctggtcggcggccaacgggtagacgttgccttgcagtagcaaggggatgtcgctggccttggcgccggagagtttcaccagtttgtcgacgttgccggtatcggcgagccaggcttgtgggtctttgcggtaggcggcgtaggcatccagagtgactttggcgaaggcggtgacgatctctgggtgcttctcggcaaaatccttgcgcacgatccatgcatcgaacgtcggcgcgccgaacttggccagttcgccggaggtaatcagcaccttgccggtttctttggccacccccagagcggggtcccacacgtaggtggcgtcgatatcaccacgcttccaggcggcgatgatggccggcggagcgaggttgaggatggtgactttggccgggtcgatgttccagtgtttcagggcggcgagcaggctgtagtggccggtggaaacgaagggcacagcgatttttttgccgaccagatcctcagggctgttgatccccgaaccgttacgggccaccagggcttcggcgccaccgatctgggtggcgacgaggaaagtttgcaccgggactttgcgggttattgcggcagtcagtgggctggaaccgagatagccgatctgcacgtcgccggacgcgatggcggcgatgatgtcggcgccattgtcgaatttacgccagtcgatcttggcgttggtggccttttcataggcgccgtcggcttgggcgactttggccgggtctacggtggtctggtacgcaatggtcacatccgccgcctgggcaaacaggctggcaccggccagggacaatgcggccaacaggcgcagaggggtcagcagtttcaaggggaagctcctcaatcaggcggccgagggtcggcgtgagaggagactaaatgatctaagaactcgaaaataaataactttttcgaattagcttatgagggtaaatggcgaagcctgttttcaggctggcagaataatgtgggagctggcttgcctgcgatagcggtgtatcagtcaacaggtgggttgctgacccaccgatatcgcaggcaagccagctcccacacaagccagctcccacaggggagcgagcctgaggttagttgctgatggccaggatgcttgcctggtacgagccgacaaacacgtcgaaatcgcccacttcgttctgctccagctccgcctgttgcgccagcgacgcacgggccagttcttcaaagtgcgcttgttcctcaggcgccaaaggctccttgcggaagtattcagcatgcacttcgctttgatgcagggagaactgcgcaaagctatccttgcgctcggccatggccgccaatacctgggccgacggcgtcagggacgggtccttgaccttggccaactgggcgtccagtgcctcgctgtgctcagtgatgccatggctctgatcgagcagggcggccagcggggcaatcttctccagcaactcggccgcccactccttcatgtccaccggctggccgtcacgctgcaattgcaggcccggacggcggccttccttgaccacgctgaggaagttggagctggcgttgccgcactcgttgttggcgaacagcgggctgtcgttcagtgcgcagtacagcaggaacgcgtcgaggaaacgtgattccggcaggtcgatacccatcggcaagaacgggttgatgtccaggcagcgcacttcgatgtactggatgccgcgggccatcaacgcctggatcggccgctcgccagtgtaggtcacgcgcttgggacggatgttggagtagtactcgttttcgatctgcaggatgttggtgttcagctgcacccactcgccatccttgtgcgtgccgacttcaacgtacggcgcgtagggcgttgccaccgcttcgcgcaggctatcggtgtagctggccaagtcgttgtagcacggcgtcaggccggcctgggcattgctctggtaacccaggtcgctcatgcgcaggctggtggcgtagggcaggtacagggtgtcggcgtcgaggacttcaagctggtgcgagcgcccgcgtaagaagccggcgtccagggcgggcgaggcaccgaacaggtacatcaacagccaactgtagcgccggaaattacggatcagcgcgatgtaggccgtggactgatagtcacggtcggtgccgacaaacccttctgtttccttgagcaacggccacaacgcttccgggagggaaaagttgtagtggatgcctgcgatgcactgcatggtcttgccgtaacgcagggccaggcccttgcggtacacgtacttgagctgaccgatattggaggtgccgtagtaggcaatcggaatatcttcctcggccggcaacgggcacggcatcgaggggctccacaggtattcgctgcccagcttggagtaggcaaagcgatggatcttgtccaggctgctcagggtctcggccgggttgggcagggctggggtgatgaactccagcagcgattccgagtagtcggtggtgatctgttcattggtcagcgcggcgcccaaggcttcggggtgcggcgtttgcgccaggcgaccttcgttggtgacacgcaggcattcgcgctcgatgccgtgcaagcattgctctagcagggagaggtgttcgcgcttgccgagcagggccaggcggcggttgagaagttcgctcaagttggattccttcacgcgtcagtcgccccaatatgggggtgggcaggacggtctacaagggtgaagttgaaactggcgtgatcgcctggttttgagtcgatttgacccgctctgaatttgccgacttcactccatgaattgggctacagcgcagcgagaaaattccgacgctgttatcgcagcgccgaaattaactcaaatcgggggtggggagctataggacagcgaacgtgccctgtgcttttgcgacaagtctttcgccttggtacacctcggcctcgaccaccagggtgcggcgaccggtgtggatcacccggctggtgcacagcacatcaccgtcttccacggcgcgaatatagttgatcttgcattcgatggtggcgctctgctggtcgaaaccgtgggcgctggaacacgccaggcccatggttatatccactaagctgaaaatcgccccgccatggagcttgcccgcgcggttgcgcaggtgcggctccagggtcagggccacctcggcaacgccctcttccaggcgttgcaggcggcagccgatcagttcgctgaatgcgctctgggtcaaaccggccggaatctccatcaacgcttcttcagctgtttagcgttggcaaacagcgacgccatggcgttgttgcttggcgcggcagtcgcggtttccttgcgcggcgcgttgttctgcgactggcgcggcgccgaaccggggcgagcaccacgtgcaccgtcgattttttcgccgggggtgtcgctcatgcgcatcgacaggccgacgcgtttgcgcgggatgtcgacttccatgaccttgaccttgaccacgtccccggctttcaccgcttcacgtgggtccttgatgaacttctccgaaagcgcggagatgtgtaccaaaccgtcctgatgcacgccgatgtccacgaatgcgccgaagttggtcacgttagtcaccacgccttcgaggatcatgcccggttgcaggtccttgaggtcttcgacgccgtcctggaactcggcggtcttgaactccgggcgcgggtcgcgacccggtttctccagttcttgcaggatatcggtgatagtcggcacaccgaaggtctcgtcggtgtacttcttggggtccaggcgcttgaggaacgcggcatcaccgatcaacgaacggatatcgcggtcggtctcggcggcaatgcgttgcaccaacgggtaggcttccgggtgaaccgcagaggcgtccagcgggttgtcgccgttcattacgcgtaggaaaccagcagcctgttcaaaggttttttcacccaggcgtgcgacctttttcagcgcagcacgggttttgaacgcgccgttttcgtcgcggtgactgacgatgttctgcgccagggtggcgttgaggccggagatccgcgccagcagggccacggatgcggtattcacatccacgcccacggcgtttacgcagtcttccaccaccgcatccaggccgcgtgccagtttgagctgtgacacgtcgtgctggtactggccgacgccgatggatttagggtcgatcttcaccagttcggccagcgggtcttgcaggcgacgggcgatggacaccgcgccacggatcgacacatcgaggtccgggaattccttggaggccagctccgacgccgagtacaccgaagcgcctgcttcggagaccatgaccttggtcatcttcatggctgggtattttttgatcagctcggcggccagcttgtcggtttcgcggctggcggtgccgttgccgatggcgatcaggtccaccgcgtgcttggcgcacagggcggcgaggatcgccagggtctggtcccacttgttgtgcggaacgtgcgggtacaccgtggcgtggtccagcagtttgccggtggcgtcgaccaccgcgaccttgcaaccggtgcgcaggcccgggtcgaggcccagggtggcacgcgggccggctggtgctgccaacagcaggtcgtgcaggttgtgggcgaacacgttgattgcctcggtttcggcgccgtcgcgcagctcgccgagcaggtcggtttccaggtgggtgtagagcttgaccttccaggtccagcgcaccacttcgccgagccatttgtctgccgggcggttctggttctggatgccgaattgttgaccaatcatgccttcgcacgggtgcatggtgcccggcagctcgtcaccgactttcaacgcggagctgagaatgccttcgttgcggccgcggaaaatcgccagggcgcggtgggacggcatgcttttgagcggctcgtcgtgttcgaagtagtcgcggaacttggcgccttcttcctctttgccggcgatgacgcgggcgctgaggatggcttcttgcttgaggtaggtacgcagtttttccaggaggctggcgttttcggcgaagcgctccatcaggatgtacttggccccttcgagggcggccttgacgtcggcgacgcctttttcagcgtcgatgaagcgcgtggcttcagtttctggcgtcagcgacgggtcgttgaacaggccatcggccaaatcacccaggccggcttccagggcgatctggccctttgtacgacgtttctgtttgtacggcaggtaaaggtcttcgaggcgggtcttggtgtcggcaagcttgatgtcgcgttccagttgtggggtcaacttgccctgttcctcgatgctggcgaggatgctgatacgccgttcgtcgagttctcgcaggtagcgcaggcgctcttccaggtgacgcagttgggtgtcgtcgaggctgccggtcacttcttttcggtaacgggcgatgaaaggcaccgtggagccttcatccagtagagcgacggccgcttcgacctgttgtgggcgtacgccgagttcctcggcgatgcggctgttgatgctgtccataaaaccacctgaaattcttaaaatcagcacgcaggcccgtagaaaaaggccggcgaggctggttgagcggcccgactggcgccgctgcctgggtcaagaggctggctattgaccctcgaaatcgaaaaattcacgacaagcgggtaaaaaaagcccggcagtaaacggtaacgatctgacgttgccctgcacgcaggcgccgcattataaccagcgttctgcccttcgggggtactgcgccgcaggttgcagggcgcgggttcgctggcagtagatgaaaaatctgctaacaatgcacacggtgcgtataacggcagctacgccataatgcgcgccgagataagaggagcatccaatgagcagcaccgcacaaactgctgaaggcgaaaaaattctcatcgttgatgacgatccggggctgagcagcctgctggagcgttttttcaactccaagggctatcgggcccgggcggtgccgaacaccgagcagatggatcgccttttggggcgtgaagtcttcaacctggtcgtactcgacctgatgctgcccggcgaagacggccttactgcctgtaaacgcctgcgcggtgctaacaaccagatcccgatcatcatgctcaccgccaagggcgatgaactgagccgtatcaagggcctggaactgggtgctgatgactatctggccaagcctttcaaccccgatgagctgatggcgcgggtcaaggccgtattgcgtcgccaggcaccggcggtaccgggcgcaccgggcagcgaagacgaaagcgtcacctttggcgactacgaactgtcgctggccacccgtgagctcaagcgcggtgaagaagtgcacatgctcaccaccggtgaattcgcagtgctcaaggccttggtgatgaacgctcgccagccgctgacccgtgacaagctgatgaacctggcccgtggccgggaatgggacgcactggagcgctccatcgacgtgcagatttcccgactgcgccggatgatcgagccggacccttccaagccgcggtatatccagacggtatggggtgtgggttatgtgttcgtgccggatggcaccgcaaccaagtgaccgatgatttgcaggggcgggtatcctggcgtttgactccatgagggtcgacgggatgcccggcgtctgcaattctgcgagcaccgctcgttcctgcaaggtgtgcagctttcatctatgaaaaccccgctgtggttcccacaaagtttcttctcccgcaccctctggctggtgcttattgtcgttctgttttccaaggcgctcacgctggtttatctgttgatgaacgaagacgtgctggtggatcggcagtacagccacggtgtggccctgacgttgcggggctattgggccgtagaccctgagaaccgcgaaaaggtagccaaggcatcgaccctgactcgggttgatggcgcgggtgtgcctgaaggcgagcaacattggccttacagcgagatttaccagcgccagatgcaggccgaattgggcgccgacaccgaggtgcgcctgcgtatgcatgtttcgcctgcgttgtgggtgcgagcgcccagcctgggggatgcgtggatcaaggttccgctttatccgcacccgctgcgtgggcaaaaaatctggaacgtattgggctggttcctggccattggcttgctctcaacggcgtctgcgtggattttcgtccgccagctcaaccaacccctcaaacgcctggtgtttgccgctcgccaactgggccaggggcgcagtgtgcgcctgccggtcagcgacacccctagtgagatgaccgaggtgtacggcgccttcaaccagatggcggaagatgtcgaacaggccgggcgcgagcgcgagttgatgctggcgggcgtgtcccatgacttgcgcacacccttgacgcgattgcgtttgtccctggaactgatgggtgaccataccgacctcaccgatgacatggtgcgcgacatcgaagacatggacgccatcctggaccagttcctggcgttcatccgcgacgggcgggatgaggtggtcgaggaggtcgacctcaccgacctcgtgcgtgaggtggttgcgccctataaccagaacggtgagcaggtgcgcacgcgcctggagccgatccagccgttcgccttacgccgggtgtcgatgaagcgcctgctgaacaacttgattggcaacgccttgcaccatgccggttccgatgtagaagtggcggcgtacgtttctggcgacagtgccgccccttacgtggtgctgagcgtgatggaccgtggcacaggaatcgatccggcggaactggaaggtatcttcaaccccttcacccgtggcgaccgagcccgaggtggcaagggcaccgggttggggttggctattgtgcggcggattgcgtcgatgcatggcggcaatgttgagttgcgcaaccgggaaggcggtgggttggaagcacgagtgcggctgccgctggggttgatgttgcctagagacgctgtctaacaagcaatatgaatgcaaatgtgggagctggcttgcctgcaatgaggacggcacattcaacatcgttgttgactgagctaccgctatcgcagcataggtatttacacaattttgtacgttgtagcagccgacggtaactacgatgcgaagcgagtcgctcttgatcttgatctgcttttgatcttaggcgccccgttaaaccacgctggcggattacgggcacaccgagcctaggcgaggtgccgagtggtggggcaagagcgctttgcttactttcgcgcttttcgaaagtgagccgccgtcagggcggaaccctaagtggcctttacctaaataacggatatgtacgcggtcaaatccaacatccccgtcggctgtcaggccgtcttcgcagcgatgcggcgacccgacaagccagctcccacaattagatcgcggggcgtcaggtagataggcgtcggctgtcaggtcgcgggagcaagctccctcgccacagggtcagtgtgtagatacctatgctgcgatgagggcggcacattcaacatcgttgttgactgagctaccgctatcgcaggcaagccagctcccacaggtgttttgtgatgggtggtaggtgggggtattcagcccttgcccttggtccgagtcatattcgggccgccgttcttctccagatgctgaatgatgatccccgccacatccttaccggtggtggtctcgattccttccaggcctggcgatgagttcacttccatcaccagcgggccatggttggagcgcaggatgtccacacccgccacactcagccccatcaccttggccgcccgtagcgcggtcatgcgttcttccggggtgatcttgatcaggctggcgctgccgccacggtgcaggttggagcggaactcaccgggcttggcctggcgcttcatggccgcaatcaccttatcgcccaccacgaagcagcgaatgtccgcgccgccagcttccttgatgtattcctgcaccatgatgttctgcttgaggcccatgaacgcctcgatcaccgactccgctgccgttgctgtttcacacagcaccacgccgatgccctgggtaccttccagcaccttgatcaccagcggtgcgccgttgaccatctcgatcaggtcgggaatgtcatccggggagtgggcaaaaccggtgaccggcaggccgatgccccggcgcgacagcagttgcagggagcgcagcttgtcccgcgagcgcgcaatggccacggattcattcagcggaaacacgcccatcatttcaaactggcgcagtaccgcgcagccatagaacgtcaccgaagcgccgatacgcgggatcaccgcatcaaagccttccaggggtttgccccggtagtggatctgcggcttgtggctggcaatgttcatgtaggcacgcaacgtgtcgatcaccaccatttcatggccacgttcagtgccggcctcgaccaggcggcgggtggaatacagacgcgggtttcgcgacagcacagcaatcttcatgcagcacctggggtagaaatagtggagaccgggaacaccggcttgtcttgaacgtacttgaggcccggattgaccaccaactggccgtcaatcagcgccttggagcccagtagcaggcggtaacgcatggctttgcgacaggcgagggtgaactccacccgccatacccgatcacccagggccagggtggtactgatcacgtagcgcacctgcgcatggccgttggagctcttgatggttttcatcgtcaccaggggcgcttcacagcgccggtgacgcaattgcaccacgctgcccaggtgcgcggtaaatcgcacccacttttcaccgtcgcgctcaaagggctcgatatcggtggcgtgcaggcttgaggtgctggcgccggtgtcgatcttcgcgcgcaggcccgccactcccaagtcgggaagtgccacccactcacgcagacctacaacggtcaaatggtcaaatgtcttcaatagggttaaccggtcaatttgcccaggcttgaggagatacctcagccaacgctttgaatgcaggcttggcgaaccagaagccctgcatcagaaatattccgcagtcggataggaagtcgcgctcgccggcactttcgatgccttcggcgatgacagtaacccccaactgctcacagattgtgacaattccctggacgatcacctgacggacacgatcctggtcgacatcgcgaatcagcgccatgtcgagcttgatcaagtcaggttggaaatcggccagcaggttcagccccgaatagcccgcgccgaaatcgtcgatggcggtcttgaagccgaattcgcggtattcacgcagaatattcgtcaaatggcgatagttatctacgtgctcgctttccagggtctcgaaaatcagccggtccagcgggaaattgtgcgcccgggctgcctccagagtgctgcggatacacagttccgggcgatatacggcattgggcatgaagttgatggaaaggtgagtctgcaggcccagggctgcggcaccggcgatggctttggtccggcagcgctggtcgaagcggtagcgattggtttcgttgacctgagccagcaccgacagcgcgccttctccctgggtgccgcgtaccaaggcttcgtgggcgaaaatagaatgatcgcgcaggtctacgataggctggtaggcgaacgcaaaatcgaaccccagcggctcgctttgctggcaacccacgcaccgctggttgggcgaggtgagtgaaataggaaagtcggtcacggcgtatcctcgcgaaaacagggtgctacctggcgtatcttaggtgagccttggggtttatgcgtcgaagggtttcaacggtaaagttgcgacatttttcagagcgaggaattcaagtggctcaaaagcaggaagagcaagagaaggtccggttggacaagtggttgtgggcagcccggttctacaagacccgcgccctggccaaggcggctatagagagcggcaaggtgcaccatcgcggcgagcgctgcaaaccgggcaaggaaccacgcgtcggtgacgagtatcagattcgtacaggttttgatgaaaaaaccatcgtggtgcaggcactttccatcgtacgccgcggcgcgcctgaagcgcaggtgctgtatgcggaaaccgaagccagtatcgccaagcgtgagaacgctgcggccatgcgcaaggcgggtgcttcaggcttgaccaccgatggcaagccgagcaagaagcagcgccgcgatctgttcaaattccgcggcagcggcaatgacgattgattgcacgaatcgcctatgcaaactcgatcaaaagtgggagcaagcaagcccgctcccacttttagccctgaggagttacgcagttgtgcgcatcacactcaaccgcccaataacgggcaacttgctcagtagcccgaaaagcggcgccgtcatgcgcaacaaggcgcccgacaccttcgccgcaaacggcgtgtaatatccccagcccaacgccagcagcgccagcagtacgccaccgatgtagtcgtcctgtccccaatgcgcgcccgcgaccagccgcggcatcatgaacagcagcgccaggccccagatcaccagcacctggccgatgcgcttggcaaatacggtcatgaacatcccccagatcaacagcaccgaagcgtggtcgccggggaagctctggctcgaacggtccttcaattcccaggttttctccagccctgggaaaaagtcgctcatttgaatcgcgccgctgatgaccatcgacgggctactgtgctgccagcccatgtgcgccgcgagtttggagaacagcatgcggataaacagcaacagcagcaggatgccaaggaagccaaaaaacgcctggcgcacctgcacggccttgaacacccagtcgccgcgaatcagcagtgccagcaagatcacgccgaccactgcatcaaacggccgcaggctggccacggcccatacatgcaaccaggtcgagtttgtggccaatgggccattgagcaggtgaaacagccactcgtcgaaaattacacagagcatttggcccgtgggccacagccaaaaacacagcagcccgatagcgagtagattgcaaagagcccatcgccggaggttccagttggcttggaacaaacccggattgttcataaactgtccctcatcgctctattgtgctccttgaattcaggagaagtcgcaccaagatggtgctaaagcgtttaattttataaaccttgtaatcattttgtcatcacttcagatacccagacctatgactgatctaccggataccgacttcacccaacgcttcatcttcgatgagagcgatgcccgcggcgagatggtttcgttggagctcagctatgccgaagtccttgccaaacacgcctatccggagccggtcgcgcaattgctcggcgagttgatggccgccgcggcgctgctggtgggcaccatgaagttcgacggtttgctgatcttgcaggcgcgttccgaagggccggtgcccatgttgatgatcgagtgctcgagcgagcgcgagatccgtggcctggctcgttatgacgctgagcagattgctgcagacgctaccctggccgacctgatgcccaacggcgtcctggcactgactgtcgacccgaccgaaggccagcgctaccagggtattgtcgacctcgacggccagaccctgtcggaatgcttcaccaactacttcgtcatgtcccagcaagtgggcaccaagttctggcttaacgccgacggcaagcgcgctcgcggtttgctggtgcaacaactgccggccgatcgcatcaaggatgaggatgaccgtgccgaaagctggcggcatatcatcgccctggccgacaccttgaaggccgaagaactgctgggcctggacaacgaaaccatcctgcaccgcctctaccacgaagaagccgtgcgcctgttcgacgcacaaggcctgcgcttcaattgcagctgctcgcgcgagcgttccggcaacgcgctggtcagtctgggcctggaagatgcgcaaaatctggtggtggaacacggcggccatatcgagatcgactgccagttctgcaaccagcgctacctgttcgatgcggctgatgtagcgcaattgttcgctggcgcaggcagcgacaccccttccgacacccgccactaaaacgtttaagcacaggtaaatcacctgacaaacgccggattagaggtgttctgacgggagggccctactctttttgggcttttctggcataatccggcccacttttttcgcggtagtagtgcgcaactttctactacaaaacgtttggagcactcggccataggccgacggggaacctcatgacgcaagccaataacgccgtatacaccgatctgagtgttgacgatctggtcaaagaagccctgcagcgcggtgaaggcgtgcttgccgatactggcgcgctggtcgtagaaaccggtcatcgcaccggtcgttcgccggttgaccgtttcatcgttgaagagccttccacccaggacgccattgcctggggcccgatcaaccgcaagttcccggccgacaagttcgatgctctgtgggctcgcgtcgaggccttcaacaacgcgcaagagcatttcgtttcccatgttcacgtaggggctgcagaagaccactacctggccgtgaaaatgaccacccagactgcctggcagaacctgttcggtcgttgcctgttcatcaacccggcccagtacaacccggccggtcgtgacgagtggcaagtgctcaacgtggccaacttcgagtgcgtgccagagcgtgacggcaccaactccgacggttgcgtgatcctcaacttcgcccagaaaaaagtactgattgccggcatgcgttacgccggtgaaatgaaaaaagccatgttctcggtgcagaacttcctgctgccggctgctgacgtgctgccaatgcactgcgccgccaacattggcgaagcaggcgacgtgaccctgttctttggtctgtccggcactggcaagaccaccctgtcggccgacgaaagccgctacctgatcggtgacgacgagcacggctggggcgaaggcgtggtgttcaacatcgaaggcggttgctatgccaagtgcatcgacctgtccgagaagaacgagcccgttatctggaaagccatcaagcatggcgcggtgctggaaaacgtcgtgatcgacgaggccaagcacgccgactacgccgacgtcagcctgacccagaacagccgtgccgcctacccgctggagcacgttgccaagcgttccgaaaagaacctgggcggcgagccaaacgcggtgatcttcctgacttgcgacctgaccggcgtactgccgcctgtgtcgatcctcagcgaagaacaagcggcctaccacttcctgtccggctacaccgctctggtgggctcgaccgaaatgggttcgggcagcggcatcaagtcgacgttctccacctgcttcggcgcaccgttcttcccgcgcccggccggcgaatacgcagagcttctgatcaagcgcatccgtggtttcggctccaaggtctacctggtcaacaccggctggaccggcggcggctacggcgtcggcaaacgcttcaacatcccgaccactcgcggcgtgattgcagcgatccagagcggcgcgttgatcggtgcgcaaaccgaacacctggacaccatcaacctcgacgtgccattggccgtaccgggcgttgaaaccggcctgttgaacccacgcaacacctgggctgacaaggctgcctacgacgaagcggcgaaggcgctggctggcctgttcatcgaaaacttcaagaagtttgaagtcagtgatgcgatcaaggcggcgggtcctaagttgtaagattcgctggttgtaaaaaagccgcctcttaagcaggcggcttttttatgggcgaacgattagtcggcgatgtgcagtaccactgcaccgaccagcaccagcacgacgcctgccacctgcaccgctgacaatcgttccttgaaaaacacaaaccccaggatcgccgcaatccctcccgacagcgtactgatcaccgtcaccaccgacaccgagccggccatcgcgccccacgaaaacgccgagaacccgccgaggttcatcaagctcgcaccggtcaacgtcgcgcagtttttcagtggcgggatcttcaggccatccttgatcttcagcaccatccccaccagcacgcacaggcccacgaggtaacccagccacaacatgctgatcggccccaacgccggcagtgtgtagcggccttgcagccagaaactggtgccgtacaaggttgcggcgaacatggcgtaggcaatcgacaggcgcgggttgttgtggggcgtaccgttgtccttgtggatgctggacagcacaacgccgatcaagcacagggcgatgcagcccagttgtatcaggctgatgtgttcaccgctggcccaggagagcagggtggtcaccactccataggacgtcaccagcggcgcgacgatggctgctttgcccaaggcaaaggctttggacagcgcaagggcgccggacaccgtcagcagagcggcggcgacgcccaggagccaaacgcttaacggtgcatcaagggatttgaaaaggaaggccgggaaaatgaccagcaggaaggtcatgatcaaaaaaccgagagcttggccgaaatacaccgcgcgtttaacgccaacggcgcgggcgttgaggcccaccagaaagtccgtgccgccccagagcagagcggccagcaggcccattgttacgtccatgtaaggtccttgttatttatacggctcgtcagatgagcgcagatccactgtgggagcgggcttgcccgcgaatgcaatgtatcagtaacgcaaatattggctgacacgccgtattcgcgagcaagcccgctcccccattttgtgctcagtgttgctcaggtcagctcaggttttccagcgcctgcgtgtcccagcggtgggtcttgatcgccaggtagagcataccgatggtcagcgggattttgtcgccacggcctttggcgcgacgcttcaggaacacgtcgaacaccggcggctggaagtaacgataagcgtcgtagtcgcttaggtcgacccggaaatcctgttccagcgcctccatgaattgcttggcctcaacgccatcgcaagcaaggtcgaagttgagcgaggtttgcaggctaatggtcttgtgtttcggcagaccgatttcttcatgcagcaattgcaggagttgctgcatgacagggtcttcggggaagttgggggccaggttcatggttggggtgcgtaggagtgggtgaggaggctttttacgttgcaggcggtatttgtttcgcgtgatgaagagagccaagcctatcaaaaacaaggccaggggaagaagttgaatgttcaggacaatggcgatgtagggtagccagaacaacagaagcagtcccgttacgatgaaggtaacggcgaaacgcgttcttaacgtgcagtcagtgattttgtaatacagcagcagatggagagcgaataatagcgctgtttgtaggtaaagccattgactaaaactcatctggagtacacatgcattgagacgcttgagcgctgcgggcctatgccaccgctgacctgagcatccaggccaatgacgatgtctgcgctgtgaaagttgcggatcctgcgagaaatcaagttgataggaggttattttcagtcggctacgcgtaactggtatagagggttgaacgggtatttgaagcagtttgggaaacggacgacgtgacgtttggcggtgtcttacaaaagcctccggcatttatggcttgcaacgatgtaatgggtaaagctgatcaattgtaggagcgagcttgctcgcgaaaaactcaggggcgccgcgttttttctgatttaccgcgtcatcgttggcgattttcgcgagcaagctcgctcctacacaggtgttgcttagacttgcgcttgttcaggttgcagctgaacgtgttgcgcggcttccaacaaatcacagccgtcctgaacgagcgggtacagcgcattaatgatgtgggaaatgtctttgaggtcggcgtggtcgaaggtcaggcaggagaaggtttccagtaagtcgctggcagcgcggatacgctggtgggcggccgattggatatcttcagctttggctgcagtgtctatgacaagagggtgggtggcggtgaagttggtgcgtagctgacgatagcggtccatcgtttcaggtatttgcatttgaacgtactcggtttgctgttaggtaaccgacatcaccgtggccaaacggtgggtggcggactgtgcgcgggttggccagccggaaacagcaatccgacacgtccgaagacgtcccacacacagccgccatagcagtgcgttacgagacgatagacgctcgcaaggcaagtaatggcacttatgtgtgctgttttcaggtgaccaaacccggtcgctgaatcggcagcgacgagccgaaccttaaaagtgagtttgttctcgagcaataaacagatagtttagtcgttcgaagttcgatcaagcactcagaagcctaccgatacaccgctcaaaaatcgcttccaatccccgatagtcacacgccaccgcgtcaatattcgcgggtatccaggccgcatgttttaccagccaccaattcaccgaaaaccccgcattcacgatgatctgttcaaacaggatccgctgcgcccgtccattcccctcgcggaaggggtgaatgacgttcaggtcgccataagcttcagcgatttggcgcacaagatcagcctgagtcgcaccgacataccaattggcgtcttgcatatgccggacgattttcgccgcttctggtggaatacgctccggggtgcaaaacagcgtgtcgcctttctggatgttgacgctgcgcagttcgccggcccagtcataaatgtcaccgaacagtatgcggtgaatgtgttgcaggcgatcaaggtcgtagggcggcggaaagagtggaaggttgcctatggcgatttcggataattcccgctcggcctggtgcaggcgtgcttcatcgagtaaatcgaggcggttgcgcaggatgctgctactgggatagcagtacgggtcctggcccaccccgtatttgtcgagcatcagcgtgaggtgttgcggtacttggcaaggacggcttcgcgtgtcggcaggggtttgtcgacgtcggtcggttgggtatcgaacccttccaggcgcaggctggccaggtaattggaacggcggatcttgtgatagtgatcctgtttttgctcaaacgtcagttcgctcatcgctgcgtcctcttggaaagcaaggcttgattgtagcgcaatgcgtagctcggtaggcgggataaaaaccccgtcacaatctgtataaaaaatctgccagcgagctcatttcagcgtatgtttcaccgcaaaatcttgtagggcgattccgcccactacttaaagggagttaagcatgggtttgctgcgtgtcgcctcggcgatgtctttgtgtgcggtggcgttttctgtccaggccgagcagttgccgattgaggtgctgagcgcggtggtcaaggaccagaaaatcgccgatgccgaagttttgctgcaacgtaacggcgcacagaacgtggtgggccgtaccaacgcgcaaggccaggtcacgctgaccagtgaggcggctgacgatgccagcaacctgctgatcatcaagaagcatggctattccaacctggtggtgaagtgcccgtgcaagggcatgacctatgccatcagcccggtgatggaaaacctcgacggcctgcgtgtggtgttgacctggggcagggctccgcgcgacctcgactcccatatgatcttccccggcaataacatcttcttcaacaataaaaagggcaccgacgccgaactggacgtggatgacaccgacagctatggcccggagaccatcaccctgcagaaaaagcattacggcgaaagctacgtctatgccgtgcacgactattccaacagtggctctcccacctccagcgagttgtccaacagtgaggccaaggtgttcgtgtatatggggcaatccctggtacgcacctactatgtgccgcagaaccgcaccggcaacctgtggaccgtattccgcatgaccggcagtggtgacttccaggacatcaacaccttcaccggcgtgagagtcggcgccgaagatgtgctcaacgaggtcaagccgttgctggatgacagcgtggccgtcaccgccgtgacggtgagctcgtcggtacaggccgatgcgaaaaagctgaacctcaagggcgaagcggcctaccaggccggtaacctggaccagtccatcgacttcttccgtcaagccatcgagctggataacagcttcggcaaggcttacggcaacctgggcctggcgtatcagaaagccggcaatactgcggagtcgatctgggccaaccgcaaggctatcgccctggccaccggtaccaatgccgcgaccgtgcgtgccggtgcctactacaacattgcacgcatctatgaagcggccggccagttcccggatgcgttgcgtcattaccagttggccaaagagcaaaaggccaacccggtgtatgacacggcgattgagcgggtgcagaaccgctgattcagctgtagctcggttgtgaaatgtgggggagggcccgccagctcccacatttttgtctgctacgtcctgctactttctcggaaaattcccacttcggccctgggccatccctccccctgtgtatcatcctgtctcttttttccttgcgacctttctcgattcgccgaacttactgggctacgtttttaagccacgttcagcggtcaatggagtgacagccttatgcacgacaccctccagcaggtctttggttacccacactttcgcttgggccaggaagagacggtcagcgccgtgctggctgggcgttctgccgccgccattttccctacggggtcgggcaaatccttgtgttaccagttgtcggccgtgttgctgccgcacctgacgctggtggtgtcgccgttgctggcattgatgcaggaccagttgggtttcctgcagcgccatggcatttcggcgggcagtatcgattcggcccagagccgtgatgaagccaatgatgtcatggcccgtgcgcgatcgggcgagctcaagatcctgatgatttccgtggagcgtttgaagaacgagcgtttccgtaatttcctgaacagcgtgcagatctcgttgctggtggtggacgaggcgcactgtatttccgaatggggccacaacttccgcccggattatttgaaactgccggactaccagcgccagttcaacatcccgcaggcgctattgctgacggccacggccacacccaaggtgatcgccgacatgcaggccaagttcgccattgctgccgaggatgtggtgaccacgggcttctatcgctccaacctcaacctgctggtggaaccggtcagcggccacgacaaacgccgcaggctggtggagtggatgaaagcgcgggccaaccagccgagtatcgtctacgtcaccttgcagaaaaccgccgagcagattgccgagcatctgaaccgccacggcattcaggccgaggcttatcacgcggggttaccccacgaaaagcgcgaaggcatccagcagcgtttcatgggcgggcgttccaattgcattgtcgcaaccatcgcgtttggcatgggcatcgacaagagtgacatccgcaatgtcgtgcacttcgacttgcccaagtccatcgagaactacagccaggagatcggccgcgccgggcgtgacgggcagccgtcggattgcctggtgttggccaaccgcgacagcctcaatgtgctggaaaactttgtgtacggtgacacgccggagcaggaaggcattcgtcgtgtgctggaggagttgcaggccgcgcgtagcgaagggcagtgggagttcttgctcaggtcgctgtcggaccacagcaatattcgcgagctgccgctcaagacgctcctggtgcaattggagctcaagggcgtgatcgcaccgcgctatgcgttttatgcggaataccggttcaaatacctgatcgagcccgaggccttgctggcgcgcttttctggcgaacggcagcagtttgtcgcggcgatcatccaggtatgcaagcgcgctaaaacctgggcgacggtggatttcgacgcgctttatcaacagcacaatgccgaacgtagccgggtggtgaaggcgctggattattttcaggagcagggcctgatcgagctcgaaagcaagcagatgactgaggtctacagtttgctcgacaccgattttgacccgcaggcgctaagcgccgagttatacacaggcttcaagcagcatgaggtgacggaggtcgcgcggatccacactatgctcgacctgttcgccactgagcactgcctggggcaacgcctggcgcgctactttggtgatgaaaatgcgccccagcgttgcgggcattgttcggtgtgctacggccaggttgcccatctgccggcaccgccgagcctgccgtcgcttgtggataaaaacttcatggggctgtgcggtgattttatccacaggcatcatgagtacacggggcacttgccgaatgcggagcgtttgacgcgttttcttggcggtatcagcgtaccgttgtttaccaagttgaaggcgcggggcattcccggttttgctgcgctggaagactatccctacgccgaggtgcgcgactgggcccatgctcaattggatcaactttgacgagacttgccgatgcctgactcaacgcctgtgcgcgacgattaccgccacttccagccgatcaccacgcgttggcacgacaacgatgcctacggccatgtgaataacgtcacctactacagcttcttcgacaccgccgttaatacctacctgatcgaacagggcgggctggatattcatgacggtgaggtggtggggtttgtggtgagttcggcctgcgattacttcgcctcgattgctttccctgagcgcattgaaatcggcctgcgggtnnnnnnnnnnnnnnnnnnnnnnnnnnnnnnnnnnnnnnnnggcgcagtatcaggcaatacctctaaacctgattcactgctatcgcgggcaagcccggctcccacactggatgtgttcgtcagagcacgtattgatcagtcgcgataacgatgcttgttcttgcgatgcccataggcatggccgcggcctgggtggccatcgcggtagtagcgacgatcgtcacggtcgcgatcgcggtaatggcggctatcgcgatcactttcgttacccatgtagttgcccagcgcgccgcccgcgccaccgccggctgctgagccgaccaatgcaccggtactgccgccgacgctgcgacccaagacgttgccgccggctgcgcccagtgcgccaccgatggcggcttcgccacggctacgcttgtctgcgccgaccgcgctaccgccagcgccgcccagggccgcgccaatggtcgaaccggtattgccgcccaactgctggccgacaacggaacctagaaccccacccaatgcgccgcctacaccggcttcggtggtgccgccagccatggctgcgccactgaccaggccaagggacaacaagagaatcgaggagaacttcattcagggaaacctcaagggatgacggcgcgatcctgaggttgtatcgagccgctgacaatcgaaatccgaccggcggcagaggttgtatacaatttgctaagttactgttttgtatcgggaacttaagtcgtttttacaggtctttaactacttcggaagggccgcttttatgcaaaagcggccctttttttgtgcctgcagaatgtgcggtgattgtgctggcctcttcgcgggcaagcggtagttcaagcaacacatatctcggatcaagtcaggccgagcgcgccatgatcaacccactgtcactcgccgcttccaagcgaatcgcaacaaacttcgacgttggcgtatggctaccgtcgccagtgctttccaatggcaccaacgggttcacttccgggtagtaagccgccgcctgacccgccggaatatcaaacgccagcagcgtaaagcctttcacacggcgctcacgaccgtcttcccacagcgacacgatgtctgccttctgccccggcttgaagcccaggcggatgatgtcggcttcgttgacgaacagcacgtcacgctggcctttgaccccgcgataacggtcgtccaggccatagatggtggtgttgtactgatcatgggagcgcatcgactgcatgatcaggtccggcacccggcccgtggcgtgggtgcgttcgtggatcaggtctttgggcaagatgttcgggcggaagttggcgcggcccgacggggtgttccaacggcgtgcgccggcggagttgcccaggtagaagccacctgggtgtttgatcttctcgttgaagtccttgaagcctgggatggtgtcggcgatcaggtcgcggatgcgcccgtagtcagccaccagccagttccaatccacgggcttgctgcccagggtggcggcagcaatgcccgccaggatcgccggctcggacttcatcagtttcgacaacggttgcagttggccgttggagccgtggaccatgctgaacgagtcttccaccgtcaccgcttgcgggccgtcggcctgaatgtcgatgtcggtgcggcccaggcacggcaggatcaacgcgtctttaccgtgcatcaggtggctgcggttgagcttggtgctgatctgcacggtcaggtcgcaattgcgcagcgcttcgaaggtgcgcgtgctgtctggcgtggcttgggcaaagttgccgcccaggccgataaagactttggagcggccttcaagcatggcgtgaatcgcttccaccacgttgtggccgttgtctcgcggcacctggaactggaaacgtcgctccagcgcgtccagaaacgccaccggtgggcgttcgttgatgcccatggtgcggtcgccctgcacgttactgtggccacgcaccgggcacagccctgcgcctgggcggccaatattgccgcacagcagcatcaggttggcgatttcctggatggtcggcaccgagtgccggtgctgggtaatccccatcgcccagcacatgatcacattcttgcctttggcgtacatgcgcgccgcttgctcgatctccaccagggtcaggccggactgctcgacgatttcctcccaggaggtgtcgtcgatctggcccaggtattccaggacgttggcggtgtgttcgttgaggaagtcgtggtcgaacactgcttccttgccttcggccagggcttggcgttcccacagcagcaggaatttggccatgccacgcaagatcgccatgtcgccacccaatgccgggcggaagtaggcggtgttggttggcttgtcgccgttggtgagcatttccagcggatgttgggggtgctggaagcgctccaggccgcgctctttcagtgggttgatacacaccacctgggcgccgcgcttcaccgcttcgcgcagaggctcgagcatgcgtgggtggttggtgccagggttctggccccagacgaaaatggcatcggcatgctcgaagtcatcaaaggtcacggtgcctttgcccacgcccacgctctgcgccagggctacaccgctggcttcgtggcacatgttggagcagtccgggaagttgttggtgccataggcgcgtacaaacagctggtacaggtaggcagcttcgttgctggcgcggcccgaggtgtagaactcggccatgttcgggctgggcaacgcgttgaggtgcttgccgaccaggtcgaaggcggcttcccaactgatgggcgtgtagcgatcggtctgggcgtcatagcgcatcggctcggtcaggcggccctgatattccagccaatagtcgctttgttccagcaaagccgtgacgctgtgcttggcgaagaaggccgcatcgacgcggcgcttggtggcttcccagttgactgccttggcgccgttttcgcagaacttgaccatgccgctttccggtgagtcgccccaggcgcagcccgggcagtcgaagccgccgttctggttggtcttgagcatcatgcgcaggtttttcagggcgttgtcgctggtcagccaggcttgcgccacgctgatcagggcgccccagccaccggctgggcctttgtagggcttgtagcgtggggttggggtctggtcggcttggtggtgaaggctcatggctggtgctccatcgcagggctatagacccgtggcgcgcttttttgcggcaggtggatgaggttgaggttgtgccggcgcgcccattgcagggccaggccggtgggcgacgacaggctgaccagagtctggatgcccgcgcgcaaaactttctgaatcaattccaggctgcagcggctggtaacaatcgccaggccgccgtcggtcggaatcttttggcggatcaacgcgccaatcaatttatccagagcgttatgccgaccgatgtcttcgcgacccatcagcaattcgccctggctattcataaacactgccgcatgcacggcaccgctgtgttggcccaggggttggaatgcgctgatacgctggcgcaggccatcgagccactgcgccggcggcaagggcgcgccgggcagtacctggaggtcgggcaatgcttgctctaccgcttccacgccacacaggccacagccgctggtgcccgccaattggcggcgttgctgcttgaggttccagaacgcacggctggaaacctgtacctgggcgtactgggctgcgcctgaaccgctgattttcaggtcataaatttcgttaacgtcggtgataatgccgctgccgaggctgaaacctacaatgaagtcttccaggtccgtaggcgtcaccagcatcaccgcctggctgatatcgttataggcaatcgccaacgccacttcttcggccagcgcagtgctggcgacttctgtgtgttcaagattgcaatagtgatagctctggctggcgacgggcgcggtcgattcaagagcgggcgccgcgcagtgagggcgcttggcgttcatggggcagtaccaccggcggattgatcagtgtttagactaggcgcgacaaagggtcacgtctaatcgccagtattgatctattgatagagggcgtcgatcaaggttcaccggcgttttcgtcgggcttattccaggtagggttgattgggatacttttgagtctttagccagtctggaacccaagtcggcaggactggtctagtcttgggcatctggaaattaaatcccaaggagagcgcaccatgagtatttttagctttatcaaagaagccggcgaaaagattgtcgacctgttgacgccgggtaatgcgaacgccagtgagcagttgaaggagcatgtgagcaaggtgggcctgggtaatccaaacgtgcagaccacggtggatggcgacaaggtcacggtgaccggtgaagtggccacgcaggaagagaaagagaagatcctgttggcgctgggcaacattgccggcgtggcaagtgtggatgaccagatcactgtcactggccctgcggttaccgctgctcgtttcgttgtagtgaaaaagggcgataccctcagcgcgatttccctggcggtgtacggtaacgccaaccagtacaataagattttcgaggctaacaagccactgttgtcgcacccggacaaaatctatccaggccagacactgcgtatccctgagtaatacgcaggataaaatgaggaagctcgcccttttgtaggagcgagcttgctcgcgaaaaactcacaggcaccgcgtttatccaggnnnnnnnnnnnnnnnnnnnnnnnnnnnnnnnnnnnnnnnnactcacaggcaccgcgtttatccaggaagcacgcgttatcgttgacgtttttcgcgagcaagctcgctcctacataagcccggtaataagttctcgataatccccgacggctgcaaattctgcggtgtcctttggtcctttcttgctatcaggctccttcactgccagcaaatgaccgacaccgaaatcccgagcgctgcgcaggatcggcaaagtgtcatctataaacaggctacgggccggatcaaactggatatccgcttgcaaggcttgccagaattgcgggttctccttgggaaaaccgtagtcgtgagagctgatcaatcgctcgaaatacggcgccagttcaatgcgttccaacttcaatgacagcgaatcacgatgagcgttggtgatcatgatcacgcgcttgccggcctgtttgatcgccgccaggaacgtatcggcatccgggcgcagggcgatcaggtgggcggtttccagtttgagttcgcgcaccggaatcttgagttcggtgctccagaaatccaggcaataccattgcaactgtccggcgttacgctcaaacagcggttgcagctccatctcggccatggcctggctcacaccgtgcagctcggcgtagcgctggggcaggtgctccatccagaagtggttgtcgtaatgcaggtcgagcagggtgccgtccatgtccagcaggacggtgtcgatggcgtgccagggcagagagggcatggtggggtctcatgtaagtaaagatatccgacacagacaatcggaaaagccacggtatagtaacccgatcacgccaaggagccgtttatgcgccagaaacccactgtcctcgcccgcgaaatagttgccagtagccgtttgttccgcgtggaggaagtgcaattgcgcttttccaatggcgttgagcgcacctacgagcgtcttgtcgggcgtggcacgggctacggcgccgtgatgattgtagcgatgatcgatgaagatcatgcattgctggtggaagaatactgcggcggcactgacgaatatgaattgtcattacccaaaggcctgatcgagcccggcgaggacgtgcttgcagccgcagaccgcgaactcaaggaagaggccggctatggcgcacggcagttggaacacatcaccgagctgtcattgtcgccaggttatatgagccagaaaatccaggtggtgttggctaccgatctttatgaagagtgccttgaaggtgatgagcccgagccgatgcgggtagaccgggtcaacctgcgtgagctgtcggcgttggcgcaaaacgagcaattcagcgaaggtcgcgccctggcggcgctgtatctggtcagagacctgttgacccagcgtggagcgttcaacgcatgagcgaactgtttttaggccatccgtttatcgccccggtcattgagctggcgcgccaggccggtgaagctatcctgccgtactggcgtgccgatgtagccgtgacctccaaggcggacgattcacccgtgacggctgccgacctggctgcccaccatctgattctcgcaggcctcaccgcgctggacccaagtattccagtgttgtctgaagaggacgccgatatcgatcagcgtgtgcgtgccggctggcagcgctggtggttggtggatcccctggatggcaccaaggaattcatttccggcagtgaagaattcaccgtcaatattgcattgatcgaacagggccgtgtggtgttcggcgtggtgtcgataccgaccactggccgttgctacttcggcggcgcgggcctgggggcttggcggtcggacgtcaatgccgcgcccaagcagattcaagtgcgccagaccagggctgcgggcgaagcctttaccgtggtggccagccgtcgtcataccagccctgagcaggagcgcttgctggagggtttgagcgagggtttgggtgagttgaaattggcgaatatcggcagttcgttgaagttttgtttattagccgagggcagtgccgattgttatccgcgcctggcgccgacgtcgcagtgggataccgcagcggcccagggtgtattggaaggggcggggggcgaagtgttggagttgaatggcaagccgttcagctacccggcgcgggagtcgttgctgaacccgttctttctggcattgccagccaaggccgcctggcgtgatcggctgttgaccctggccagatcttaagatcactgcagagcaaaatgtgggagcgggcttgcccgcgatggcggagtgtcagtcgtacaggtattggctgatccacctctatcgcaggcaagccagctcccacattagctttatggagtggctgctagcgatgcagcacgtactggccggtaaagacgacggcatgctcttcactgccttcattcacaatccacgtctccagcgccaaccgcgcccgcccatagcgctgataggtcgccacaaagcgcttccacaccttctcctgcggcgccgcgcaaatggctgtcgcgtcctgggtcaccggcagtgggtagctgatctgcccttcctgaatcacgatgtgcccgtcctcaatcccggcttcacgcagcttcaggtgcagccaaccccaacctgccagcacggcgccgcagtagaggctgccgccgaacatggtgctcttgtggttgatattggcttgcaacggcaggtgcagttgcagttggtcgtgttgccagtcgagcaccctgaggcccatttcccgggtgagtgggatgtcatggtgaaggatggattccaggtaacggctgtcgcggctcattgcggcctcttcgtgggtggacgatgtcattcgtcgtcggcgctctggctggcactgtcggcgaagttcaggccgtgtttgcgcagtttgtcatgcaaggttttgcgcggcacgcccaaggcttcggcgaggctgcgcacggagctgtgggggcgggtcagttcggcggcgatcaggcttttttcgaactgttcgacttgctcgctcaggcctcctggcgtggaggtcagcacgccggcggcgggatggtcctgggtgttgtccagggccagctccaggccgagggcgaaacgctccgcggcgttttgcaattcccgcacattgcccggccagctgtggcgcagcaacagcgcgcgctggcccggttgcagttcgtgcaagggcaggccgtgacggctgctggcctcgtcggcgaagtgctggaacagcatcagcgcatcttcaccccgttcacgtagcggtgggatgcgcagcggcgccacattgaggcggtaatacaagtcggcacggaaacggccctggtcagcggcctggcgcaggtcttccttggtggcggcgataatgcggatatccagcgggatcagctgattgccacccaggcgttccactacgcgctcctgtaaaagacgcagcaacttgacctgtacatccaggctcatgctttcaatttcatccagaaacagcgtgccgccattggcaaactcgaacttgccgatgcggcgcttctgcgcgccggtaaacgcgccgggttcatggccgaacagttcgctttccaccaccgattccgccagggccccggcgttgatcgccacaaacgggccgctgcgtcggcttgagaggtcgtgcagggcgcgggcgacgacctccttgcccgccccggtttcgccgaggatcagcacatcggccttggttgcggccagcgcaccgatttgctcgcgcaggcgcaacatctgtggcgagtgccctaccaggcgcgtgctcagttgctggcggtcgctgagggccaggcgcaggctgcggttgtccagtaccagccggcgcagggccagggcacgacgcacgctgtcgagcagcgcgtcactggcgaagggtttttccaggaagtcataggcaccggcacgcatggcctgcaccgccaggggtacgtcgccgtggccggtgatcagcagcaccggcaggtcggggtcctggccgtgcaattcggtcaacagctccaggccgtccatgccgggcatgcggatgtcgctgaccaccacgcccggccagtcgcgggacaggcgtgtggtgagcccgttggcttcgcccaggggcaggactttcaggccggccaggtccagggtctggcacagggcctgacgcaggtgtggatcgtcgtcgatcaataccacctgaatcgagttgtcgatactcatacactgcggtcctcggacggttgcagactgacgcccggcgagccggcacgcaatttcaaggttaacagcgcgccgccttccttgtggttggcaaacgacagttcgccgccaaaggcgcgcatcagggtgtcgcagatcgccaggcccaggcccaggccttgggtgcgcgtcttggtggtgtagaaaggctcgctggcgcggcccagggcttccatgcaaaagcccgggccgttgtcgcgaatatacaagttgacgccttggggcgtggtttcggcactcagccacagtttgcgtggcgggcctttttcggtgagggcgtccagagcattggccagcaagttacccagcacctggcgcaggcgagtttcacctgcctgcacccacaaggtcgcctctggcaggtcgcggatcaactccacctccatcgaacgccgacgcttggccagcaatgccagggcgtcgtcgagcgccggttgcaaagccacgctctccggcgcatgccggtcgcggcgggcgaatgcgcgcaggtgggcgatgatcgaggccatgcgcccggtcaattcgctgatcagcttgaggttgccgcgggcgtcgttggtgcgctcatggtcgagcaggatttcggcgttttcggcatagctgcgaatcgccgccagtggctgattcaattcatggctgatactcgccgacatggtgcccagcgccgagagtttaccggcctggaccaagtcgtcctgggcgcgcaccagttcttgctgggcatgctcgcgctccagcacttcctgtttcaggcgccggttcaggccctccaggtcgctggtacgctcggccacgcgcatctccaactcgcggcgggccttggcttcgaaggcgatgcgttccaggtagtgccggcggcgctgcatcagcaaccccagcaacagcatcagcaccaacaacgtggcgccgcctacggcgacgaccgtgcgcaccggacggttgatcagcgagcgcggcgcgaggatttccacgttccagccggtctcggcgatggccgtggattggcgcagccaggcgctgctgctgaggctcagcggctgcgggtcgcgggtggggtagggctggatggcaacgatggcctcgcgttcttcggcagtcagtggccgagtggcgcggaatcgccattgcgggcgtgaggtgaggatcaccacgccgttatggtcggtgaccaacagttgttccggggtattgccccagaggctttcggtgtggtccaggtcgaccttcaccaccagcacgccaatgatggtgtcgccgtcacgtaccgcggcagcgaagaagtagccgcgcttggccgaggtggtgcccaggccgaagaagcgccccaggcgccctgccatggcctcgctgaaatacggacggaaggagaagttgcgcccgacaaagctgtcttgtttgtcccagttggacgcggcgagggtcttgccggtggtgtccatcaaatacatcacctctaccccggcctgggcggcgacgtccttgagcaactggttggcactgaccaggtgggtgctgacgtggggcgcgtccaatgcggtgcgcagggccggcaagtcaccgaggatttgcggcagtatttcgtagcgatgcagggtgcccaacaagttggcgacgtagaggtcgagggtctggcggttttgcccggccagctcgctgcggtaatagcgctcggccaaatgctccagcggccacaacagcggcgccaggcacagagccagcagggctaggctgcgccagcggggtcttcgcgcaagaggtggggtcatggaagtcgcgcctgtgggtacaggcgcattatgcctagtgctgctgtgcaagacactcgtgcaatgcgtcctgccactgtggctggctgacgtgccattgctgttgcaggcgcgtgcagtccaggcgcgagttcagcgggcgcttggcgggggtcgggtaggcgctggaagggatcggttccagctcggcgcaggccttgccttcggcgcgcagttgctcgccaatcgcctcggcaaaaccgaaccacgaggtttcaccctgggcagtgaggtggtaaacgccccaatcccctgccttaccggcctgccactgctcgatcagcacacgggtgctgttggcgatagtcccggcccaggtcggcgcaccgatctggtcggccacgatgcgcatctgcggtttttcctgcagcaggcgctgcatggtcagcaggaaattcttgccatggctcgaatagacccaactggtacgcaagatcaggtactggccacctacagccgcaatcgcctgctcacccgccagcttgctctggccgtagacacccaatgggttgggcgtgtcgtcttcggtgtaggcggcaggtttgctgccgtcgaacacgtagtcggtcgagtaatggatcagcgggatacccagcgccttggcttcctcggcgaggatgctgggggcgatggcattgatggcaaacgcagcgtccggttcgctctcggccagatcgacggcggtgtgggccgccgcgttgatgatcaggccagggcgatgggcgcgcacttgttggcggataaggtctgcgtctgccaggtcaagctggtcgcggcccaggacgataagttcgcccaggctctggagccgcgcctgcagctcctgggagacttggccgtgttggccggtgatgaggattttcatgggaacaagtcagcgtccatcagcagtttaccgacctgatccttggcggagagttgcggcggttcggccagctcccagtcgatagccagcgtcgggtcattccagagaatgctgcgctcggcgcttggctggtagtagtcggtggttttgtacaggaattctgcgtactcactcaataccacgaaaccatgggcgaagccttccggcacccagagttggcgatggttctgtgccgacaggcggacacccacccactggccaaagttgggtgagctgcgacggatgtcgaccgctacgtccaacacttcaccgtaggtgacacgtaccagcttgccttgagtgtgttcaagctgatagtgcaaacctcgcagcacgcctttttgcgagcgtgagtgattgtcctgcacgaaattacgcttgagcccggtggccgcttcaaaagcgcgcgcattgaaactttcgtagaagaaaccgcgttcgtcgccgaatacctttggctcgaggatgagtacgccgggtagtgtggtttcaactacattcactgggtctctccggcaagcgagtagaggtattggccatagccggtcttgccaaagtacttggcgcgctccagcagatagtcacgatcgatccagccgttttcgtaggcgatttcttccaggcaggccactttcaagccttggcggtgctcgatggtctgaacgtaggtcgaggcttccaacaggctgtcatgggtgccggtgtcgagccaggcgaaaccacgaccgaagcgttcaacgtgtagatcgccacgctggaggtaggcattgttgacgtcggtgatctccaactcgccgcgtggcgacggcttgaccgccttggcgatcttgatcacgtcgttgtcgtagaagtacaggccggtcaccgcgtagtgggacttgggtttagccggtttttcttcgatggacagggcgcggccttcgctatcgaagtcaatcacaccgaagcgctcagggtctttgacccagtagccgaacaccgtggcgcccgaaggacgttcggcggcggtgcgcagttgctcgccgaaatgctggccgtggaagatgttgtcccccaggatcaagcacacagggtcatcgccaatgaactcttcgccgatgataaatgcctgggccaggccgtccggcgaaggctgctgcgcgtaggtgaagcgcacgccgaactggctgccatcgcccagcaggttctggtattgcggcaagtccactggcgtggagatcaccagaatatccttgatcccggccagcatcagtaccgagatcgggtagtaaatcatcggcttgtcatacaccggcaacaactgtttggacacgcccagggtaatggggtgcaaacgcgtgccggaaccgccggccaatacaattcccttcatcatgcgatcaaatccttcacgtcagtattgcccagtcgttcaccttgataactaccgtcttggaccctgcggcaccattccaggttatcgaggtaccactgcacggttttgcgcaggccggtctcgaaggtttcttccgggacccagcccagttcgcgttcgatcttgctggcgtcgatggcgtagcgttggtcgtggcctgggcgatccttgacgaaggtgatcaggtcggtgaatttctccacgccggctgggcgttgtggcgccagttcttccagcagggcgcaaatgccacgtaccacgtcgatgtttttctgttcgttgtggccgccgatattgtaggtctcgcccacaaccccagtggtcaccactttgagcagtgcacgggcgtgatcctcgacgaacagccagtcacgcacctgcagaccatcgccatacaccggcagtggcttgcccgccagggcgttgagaatcaccagcgggatcaatttttcaggaaagtggaacggcccgtaattgttcgagcagttggtcaacagcactggcatgccataggtgcgctgccaggcgcgtaccaggtggtcagacgctgccttgctcgcggaatacggcgagctcggtgcgtacggcgtggtctcggtgaagaggtcgtccacgccgtgcaggtcgccatacacctcgtcagtggagatgtggtggaaacggaacgcgctttttgccggctctgccagcttctgccaataggcgcgcgtggcttccaacaggctgtaggtgccaacgatgttggtctggataaaatccgacggaccgtcaatggagcggtccacatgggactcggccgccaagtgcatgatcgcatcaggttcgaagcgtgcgagtacgccgctgacggtggcctggtcgatgatatcggcctggacaaactcatagcggctgttggacgcgatgctggccagcgactcgaggttgccggcgtaagtcagcttgtccaggttgagcacttcatgctcagtgtgttgaatcaagtgccggatcagggccgagccaataaatccggcaccgccggtgatgagaatgcgcatgtcgagggccttttccttagacggacactgggcgaaagtagcatagcttgagttgtgaatcgggccggcgcaagcaccgtgagtagaaggggttgattaacgccacagaacaatggcgatatagacgcctgaaaaaacaaaggtcgtcacaatgtcgttagccacgttgacccaccgtgccagcttgccttgcccacaagtcacccccgaacaggccgcatgcctgctcgatcgacactatggattgacgggcaaattacgctcattgggcagtcaacaagacctcaactacagaattgacagcacgcagggccgtttcgttctgaaagtctgccggggtgactacgccgcggttgaactccaggcccagcacgcggccctcaacagcctgggcacgcatcccggcctgcgcgtgcccaaggttatccagaccgtagaaggtgaagagttgctgacggtcaacgtcgatgaccaaaccctgcacctgcggctgttggactatatcgacggccaacccctgacgcatttgccccacctgagccgcaccgtgatcgaaggctttggtgagctgtgcgggcaaatgagcaacgcgctggcaggtttcgaacaccctggcctggagcgcaccctgcaatgggacccgcgccacgcgcaggcattgatcaaccacctgctggcaaccttgcccgacctgccgcagcgtgctgctttggagcaggtggccaggcaggtcgaagcgcatgtccagccgttggcggcacacctgccgtggcaggcggtgcacatggatatcaccgatgacaacgtggtgtggcagcgtgatgcccagcggcactggcgtatacaaggcgtgatcgattttggcgatctggtgcgtacctggcgaattgccgacctgtcggtgacctgcgcggcgcttttgcaccatgccgacggtgatccgtttgccctcttgccggcgatccaggcctgccacgcggtcacgcccttgcagcgcgaagagttagaggtgctgtggccgttgatcgtcgctcgcgcggcagtgttggtgctcagcagtgagcagcagcaacgcctggacccggataacacttatctaaagaaaaacgccgagcacgagtgggaaattttcgatatcgccacgtcggtgtcctttgagctgatgcaagcggcgattctgcgcagcgtcggcgaaacattaccgtccgtcgccaaccacgacttcgcgcctttattgccaggtttggtgggtcgcgagttcgccctgatcgacctgggcgtactcagcccgcatttcgaggcaggcaattgggaaactcccggcatagatcggcgcttgctggatgaagcggcgacggtgcatgggctggcggccagtcgttatgggcaataccgcttgtcgcgctcccggcccgacagcgcggtagagccggagaccttccccctgcatgtcgaactgcatctgccccacggcaccgtactggaagcgcctttcgcaggaacactgcgcgaagataccgacggcttgctgtgcttgcacggcagtgggctgaacctgcgcctgtggggtgttcgaacatcactcaaggccggtgcaacgctggtgaaagggcaggtgctgggcgaggttcatgggccgttgaccgtgcagttatgccgcgccgaccttgagccaccgctgttctgcacaccttcccgggcgttggcatggcaggcgttgtgcccgtcacccgcggcgctgttgggcctggcctgtgatgctgagccggaactggacccagaggccctgctggcccggcgggatgccagctttgcccgctcccagaagcactactacgccgacccgccgcgtatcgagcgcggctggcgcaaccacctgattgatatgcagggccgatcctacctcgacatgctcaacaacgtggccgtgctggggcatggccacccgcgcatggctgaagtggcggcacggcaatggtcgttgctcaacaccaactcgcgctttcactatgcggcaattgccgagttctccgagcgcctgctggcgttggcgccacagggcatggaccgggtgttcctggtcaacagcggcacggaggccaatgacctggcgattcgtttggcctgggcctacagcggcgggcgcgacatgctcagcgtgctggaggcctaccacggctggtcggtggcggcggatgccgtgtccacctcgattgccgataacccccaggccttgagcagccgcccggattgggtacacccggtgaccgcgcccaatacttaccgcggtgaattccgcgggccggacagcgcgccggactatgtacgaagtgttgagcataacctggcgaaaatcgccgcgagccagcgtcaattggccgggttcatctgcgagccggtgtacggcaatgccggcggcatctccctgccagcgggttacctgcaacaggtatatggcttggtccgtgcccagggtggcgtgtgcatcgccgacgaagtgcaggtgggttacggccgcatggggcatttcttctgggggtttgaacagcagggtgtggtgcccgacatcatcaccatggccaaaggcatgggcaacggccagccgttgggcgcggtgatcacccgtcgagaaattgccgaggcactggaggccgagggttacttcttctcgtcatccggaggcagcccggtcagctgccggatcggcatggcagtgctggacgtgatggaggaggaaaaactgtgggaaaacgcccaagtggtaggcgggcatttcaaggcacgactggagaaattgatcgaccgccactcactcgtcggtgcagtacacggttcgggattctatctgggccttgaactggtgcgtgatcgccataccctcgaacctgcgacggcagaaaccgccttgttgtgtgatcgtctgcgtgagttggggattttcatgcagcctacgggggattacctgaatatcctcaagatcaagccgccgatggtcacttcccggcgcagcgtggatttctttgtcgacatgttgtcgaaagtgctggatgagcaactgtgatttatcgatggttatcggctatttgttgcagaactgagcacctatcgtatttttaggctgttaaagccgatttttatccattataaagttgcccttcaccccattcggagccctgatcgccatgaccaccttgcacagcacacctcgcgccgatggctttcacatgcctgccgaatgggcgccccagactcagacctggatgatctggcccgagcgcccagacaactggcgcctgggcggcaagcctgcgcaggcggcccatgtggcggtggccaaggccatcgcgcggtttgagccggtgaccgtcgcggtttccgccggccagtacgaaaacgcccgtgcccgcctggacgtgcccaatatccgcgtggtggaaatgtccaatgacgacgcctgggttcgcgacaccggcccgactttcgtgatcaacggcagtggtgaagtacggggtgtgaactgggacttcaacgcctggggtggttttgacggcggcctgtattcgccgtggaaccgcgattcccaggtgggaggcaagatcctcgagatggagcgcgcaccgcgttaccgcactgaaggctttgtgcttgaaggcggttcgattcatgtcgacggcgaaggcacactgatcaccaccgaagagtgcctgttgaaccgcaaccgcaacccgcaccttgatcgtgcggccattgaggcggtgctcagcgataacctagctgtggataagatcatctggttgccggacggcctgttcaacgacgaaaccgacggccatgtggataacttctgctgctacgtgcgtccgggcgaagtgctgttggcctggaccgacgacccgcaagacccgaactacccacgctgccacgcagccatggatgtgctgcaaagcagcaccgatgcccagggtcgctcgttcatcgtgcataaaatgccgatcccgggtccgctgtatgccactgaggaggaatgcgccggggtagatttggttgatggcagccaggagcgtaatccgaccgtgcggttggccggttcctacgtcaacttcctgatcgtcaacggcggcatcatcgcgccgagcttcgatgacccgttggacgaccaggccaagcaaatcctgcagaatctgttcccacagcatgaagtggtgatggtgccgggtcgcgaactgttactgggcgggggcaatatccattgcctgacccaacagcagcccgccccgcagcgaaagtgagtgcagttgtaacagcgccttgatggcgtaggagcactgcgcccttgcggtgctccccgcaagcccgcgacccagcccggtcgcgggctttttcatgcctgtatgccaatgaacagggcacattggcatagctcttgtatcgctgtggttacagtggcccaagggggatgaccgcgcagttctgtcacaaaccttgagtaagttagccgctcacgcagcaggagagagcgctgaaatgaatgccgatgtccacctgatgaacacgcgtacgttccaccctttgcgggtcgacggtgacgccatccatgcgttggccctttggttgaaggcgaacggctcgcgacaggccaggcaagcgtctgacttgcgcagtgtgatgagtgagcgctacccgttggggttgttcacggaggatgaagtgcaggcgttgtgcgaggtaatgagcaactaaagaacacctgaaaccaactgtgggagttggcttgcctgcgatggcggtggttcagttaaacattcagtgactggcacaccgctttcgcgggcaagcccgctcccacagggatctgcgccaggcgctgatgttgtgggcactacctaaccagtgtgggagctggcttgcctgcgatggcggtggttcagttaaacatccagtgactggcacaccgctttcgcgggcaagcccgctcccacagggatctgcgccaggcgctgatgttgtgggcaatgcctaaccagtgtgggggctggctttgtttcacatgaggctttgtcagaagctgtaggtaccggtaaccaccagacttcgcggctcacccggttgaatctgcgccgcactggtcgccgaggcgtagtagtttttgtcggcgatattgttcagtgctgcccgcacgtcccattctttctgacggaacccggccagcgcgtcccagcggccataacccggcaacaccacagtgttgaggttgtcggcatatcgatcacccaccagggtcaaaccggtttccgcgtaccagcccatctgcggtttccaggtgatgaacaggctggcgttgcgcttggccacgtcgctgattcgtttgccttcaaagccattgttgtccttctcgaccttggcgtcctgcaggcccacgccgccgcgcacataccagttgtcgacgatcttgccggtggcggtcagctccacgccgcgtgagcgttgctcgccggtgagcagcgtaatggtgcggtccagcgggtcgctggtgcggcggttgtagagttccagttcgtacacggccagggtggtgctcaggcgttcgtcgaaccagtcgctcttcacgccgatttccttttgcttggtcagctccgggctcaggtcgttggcgttgccggtggcgttcggcgtgatgccgatcaggccgccgccagctggtgtgaaggtcttgctccacgaagcatagaacgagtggtgttccaggggcgtccacaccaggccgacccgcgggctggtgctgtggcttttcacgttctgttggatgtcgagcagcttgttggtggtgtccacttcgaaacggtcgtaacgcagcccgcccagcagttgccactggtcgttcaagcgcagttggtcctgcacatacagggcgcggctttcgacttcagtgtggttgttactcgacagtcgcatgctgccggtgtggctcaggcggcgattaggctggttgaggtccaggctcggcactgtcctgccatcccgagcggagtacagcttcggatcgcggcgctggctgcccagctcaatgccggtgagcaagcggtgctccaggccaaaggtgtcgaaaccgccttccagctccaggttgttgaacacgttgcgggtggtcaggtcctgctgccagtgttggcgggtgacgctgttggttttcggctcgtaaccggtctggtaggtattgtcgaaatcactgtcgagcttgaacacgccgagggtatggcgcagttgccagtcggcattgagctcgtaggcgagtttggaacgcagggactgggacttatcgtcgatgtaatcgccgtgatcaaagtaagtggtgctgcggctcacatccgccgggcgcccgttgacgcccggaatgccacggtctggggtgcggttgtagcggctgtattcgtattgcaccagccagttcagctctggagtgagctgccagctcatcgatggcgcgaacaactggcggttgccgctgacgccatcgcgaaagctgttgttgtcctggttgcccatgttcaggcgcaggctgatgttgtcggtggggtcggtgctcaggtcggcatacaggctgcgcaaatcgttgctgccgccttgggcttcgatactggacttttgccctggggtgggcattttgctcacccggttgacgatcccgccctggccgcctcgcccgtaaagcacggcggccggacccttgagcacttcgatacgctcgatgttatgcaggtcgcgcacgtactggctgtcgtcgcgaatgccatccagatagaagtcattgctggcgtcgaagccgcgtatgcgcaggctgtcaaagcgtgtatcggcgccgctgctgacgttggggataccgctcaaggcctggcccaggtcgttggtgccataggagcgcaggctttcggttttgactgagtcgatcgcctggggcacatagcgaacggccgtcgcggtacgtgtggcggtgctggtttccttgacccgtgggtcgtcttcgtctgcttccacactgatcgaggtttcaggcaagactgtggccgcaccggcaaaaccggcagacagcagaacagagagcccaagggagaggggcgtcaggcgaggggcaggcatgggagtgtatccaaatgacgtggcaggaaaattgtgcgcgaatggtaatgctttgcatttgcgcgcgttatctattccctaatgcctaccctgtaggatttgttacttaatgtgtttcgagggggtttctaggcgcttttcaggctttcatccccgcgccttcgctcgccgcttagacgaatatcgcctaaatacagacgattcacgaaattgacacatagttcaacgcccgcataggattgcgcccaacgcctgtggctaaccaccatgactaatccaataaaaaaaggcccgcggcagttcagtcgtccgcgggccttctttttgccggcaaagtcgacaccagaaaaagcaataggagcctggtgtcacagcgcgtactcaacccgtaataaggaatataagaaaatgttgaagcaacggatgagtctgatcgctctggggattttgagcgcatcgacagcaatggcaaacgaccaggagcaatccaaggggtttgttgaagacagccacctgaacatcgcagcacgtaacgcctacatcagccgtgacaaaaaaaatggcgagaaggacaaggctgaatggggccaaggcttcatcggcaagttcgagtccggcttcacccaaggcaccgtgggtgtgggtgtggatgtgattggccaatacgctatccgcctggacggtggtaaaggtcgcgctggcgccggcggcatcgacttcttcaagcagggcaacggcactgttgatgacaacggccagcgaaacccaggctcggcaccacacgacctggccaaaggcggcgctgccgtgaagttccgcgtttccaacactgtactcaagtacggtgatcagttcccggctgtgcctgtgctgcagtacgacaactctcgcctgttgtcggaaacctacaccggtacttcgatcgtctctaaagagatcgccggtctgcaactggacgcgggtcatttcaccaaagaagcgcgcaagagcatggaaggcaccgacagcggccgcctgaaaagcatcgactacattggtggtagctacaaattcaccgaaagcctgtcggctgccctgtacgcctccgacatgcaggacgtgctgaagaagcagtacgtcaacgtcaactacgtgctggccctgccagagaagcagtcgctgacgtttgacttcaacggctacaaaaccaagctggaccgcagcttcgccctggaaaaccaaggtgatgcggacgctcgcgacaacaagatctggagcctgggcgctacttgggccgttggcgcgcacagcttcaccctcgctcaccagcgcagcaccggtgacaccggctacctgtacggtggctaccgcaacgctggcggcattggcgacggcggcaatacgatcttgctggccaactcctactggtccgacttcaacggcaaggacgagcgctcctggcaagcaggttatggcatcgacttcgccaccttcggcgtaccgggcctgacctacaacattgcctacgtgcgcggcaccaacatcgacgacggcactggccgtggcgatggcaccgagcgtgaaatctggaaccagttcaagtacgtggtacagagcggcccagccaaagacctgagcctacgtgctcgcgcctcgtggttgcgcgtttccaacaacgccagcaactacaacacaggcggtaacgaaatccgtctgttcgccgactacccgatcaacgttttctaattgatcgaatgtcgtgcctgatgccaggcaataaaaaccccgactggttcggggttttttattgcgcgccggctaagcgggtgacctggaggtgcacatacgccacccgcttattattcgttcaaggcgctgttaaatagctgactgtgcataaagtctatgaagactcgcagcctcagtgaaaggtgtttgctggaaggccatacaagccgaaagactccggtatgaaccgtatagtccgtcagcacttgcaccaattcgccgttcttgatggattgggtcgtcatgaaatcaggcaggcaggcaacgcccaaacctgaacgagccacatcgacaatcacttcagtcgtgttgcacaccattgtttgaggcagctcgaaatccggctctccagccgcaacgcgtaaaggccaaggttccacttttcccgtcgaaggaaacttgtgcagcaggcatgaatgcatggccagatccgctgggcgtttgggtactccatacgctgcgagataggctgcagacgccacaatctgcagctggaagccccccagccgtttagaaatcagccgcgaatcagtgggctcgcctgtgcgtaacacggcgtcaaaaccttcctcgataacgtcgaccatgcgatcagaaaagtcgatgtcgagttctatttccgggtaggtgcgcatgaactgaatgattgccggcatgacgaggccgctgacgagaggcaggctgattcgcaatttgcccctcggtttttcacgtgcgttgctcagctccatttctgcagcttcaagctctgaaagtattcgtcgacagcgttcaagaaacagtgagccttccagcgtcagggcgatgcttcgcgtgttgcgctggaaaagacgtaccccgagcctgtcctccagccgaccgatacttttaccgacgcccgacgaagagatgcccaatcgtttccctgcctgggtaaagcttcgagtctcagccaccaatacaaataatgaaatgctgccaagcgactccaacggatggccctcactgcggacacaagagtccgatatgttcggattataggcctgtttttgtttggagacgcaagccctaacctttggatgggccgatcaccgcagacaactgtgcgcgaaggaccgacacctgcgcatatcaatgaaggaaccattcagatgaactcaacacacagcgctcagacggctcccccgttattgaagtggctgcagcttttcgcagcttgcctcacaggcgtactcattccgctttgctttaccgggccagccgtagtgctctcttccatcagtgctgccatgggtggatctgctgtagagctcagttgggtggtcaacgcttatatccttacttatggcagcgccatgatggcggcggggagcctgacggatatctatggacgcaagcgggtatggctgattggcctggtcatcttcgtgttgtctaccgtcgctattcccttttcttcgactgttttgcagatcgacatcctgcgccttgtgcaggggttgggcggagcagcggcgttcgctggcgccatgtcgtcattggcccaggtgttccacggcgcagagcgcaccaaagtattcagtctgctcggtacgacgttcggcattgggctagccttcggcccgctggccgcgggagtattagtcgattcggcaggttggaagtggacgttccatgctactgcattgataggcatcgcgggcttcgtgctcgtgtgcgtgagtgcgacggactctaaagatccggctaacaacggtatggattggccgggagctctgagctttacggccgcattgacgttgtttacctatggcgtccttctcgcgccagaggatggttgggccagtcccatcgtgttgggctgtgtcgctggcgcgatcattctgttcatgatcttcgtggcgattgagcgtcgtgtcagtagcccgatgctcgacctttcattgttcaaacaagccaaattcgtaggcgtgcagattcttgcagccagcccggcgttcttttttgtcgtgctcattatcatgctgccggcacgatttatcggggtcgatggactcagtgccctgcaaaccggaaaaatgatgattgcgttggctgcaccgttgttgtttgtaccgtttctagcggcccagctcgcgcgtcactacacctcagggatgctctcggcagtcgggctggtgttggtggctgccgggctgttctggctgggtgttgtgctggatagcggcgccagcaatgcagtgatgcccatggcgctgatcggtatcggcattggcctgccttgggggttgatggatgggatggccgtcagcgtggtggagaaagaacgtgcgggaatggcgactggcattttcaacgctgttcgtgtgtccgccgacggaatagcgatcgccatcgctggtgcgttgctggcgacgtttattcaatgggggctgttcgacgccgctacccattttgctgtggatcagattatgggagcctccagccgggcagcgctcggcgatctgcacagcgcaggtaatcagctgccagggcagtcggagctgttgcgcctcgagtatgcgaaagggtttcggcacctgctgttcatccttggggctggtagcgtgctgacggccattgctgtgtacgcaacactgggtcgagtcagcgcgcatgatcatcaaccggcggaagcagtccgcccggtgatcgtgggtgacggcgaatgattggccagatgcaaacgagcgacgattccaatcgaactcaccctgcgttttcacgtgtgtttgcgcctggccatcttacgtttgggctgatcgcgccgctggaagggtatcccgatcgcatggcacccaccatgcaggatcatgtcgatctggcgcgccaagccgacatcgcgggtttctccgcgatatggctgcgcgacgtgcccttgctggacccggagttcggggacgcggggcagatgttcgatccgctggtgtacgccgctcacttaggcgtggttactcaacgtatctgcatcggcactgccggcgtggtgttgacgttgcgcgatcccttgatggttgccaagcaagccgcgacccttgatgtgttactgcaggggcgctttctgctcgggctctcaacgggtgatcggcccagcgaatacccagcgttcagccgggagttcgacaatcgtgcagagcgtttcagggagggttgcgaagtgctgcgtatagcgacccaacaggcgtttcccacgtacgagttttgccactatggcaggctcgacggcaccctggatttgcttccaaagccctggtctacggcaatgccgatgcttgccgttggccgttgtggtcaagacatgaagtggttggcgtcgaatatggatggatggctctggcaccagagtgactttggcagcctgcccaatttgattgagcagtggaggtcttgttctgcgccaggaacgttcaagccatatggttatgcgacattcttcaatctggaagaaaatcccgacgctccgttgaaggtggggcgaggcataagcaccggacgcaatgcgcttattgatttgtgggagcgacaacaagcgcaaggtgtttcacatgtcgcattgaacctgaagccgttacgtcgccctgccaaagatgtcttacaggagctagcagaatatgtgctgccgcattttccagcccagggagcaaaccttgtctgaacaaaacgcgccgtcagctcaggacttgttgaatcaaagcatggttgtcccacgcagtccgctacgtatgtggctggcaggttggatggtggtgtcggtgtttattctgtccaataccgcgaccccgctctatgtcgtgtggcaggggcaactcgggtttgcatcttcgaccctcacgttaatattcgcggcctatattctggggctattgctcagtttgctggttgccgggcaagtctctgaccgctacgggcgcagggtggtactcctgccgggcctggtctgcgcgatgtcggctgcatggttattcaagtccgccgaatcggtggagagtttgctgttcgcaaggctgcttacaggtattgccgtagggatcattgtctcggcggggatggcaagtgtggtggatcaaggaggtctaccgcggcgaaggttatcttcgctagtggcctcgatgtcaatggtgctgggagcaggtctcgggcccttgctggctggcagctttgccacgtttgcaagtcagccgatcgaaaaggtgtttaccttggagctagggatacttgcactcgctttcctgatcgcctggacgatgccagacgaagccaataaggccctgccacgaggccatgcgaaatggaggttcccttcggtcgagcgacatcatcgccttcacatactgttaggaatcgcgctgttcggtcctggcattacagcgacctcatttgtcttgtcgttagggccatcgctattggcaagtctgcttaacatcaagacgccgctgatggcaggagccactgcgtttctaatgttcatctcggctttcgtcgtccagatggcgctgcgccgacgcactgtggaacatatcttctatttcagtgccactgcgaccttcttctcgatgctgggtatctgcactgcgatagcaatttcctctcccgtcgtcctgattatcgccgccttgctagcgggtgcgggtcaggggctggggcagttgggaggattgacgttaatcgcgttaaggatatcggacaacaagcgagcgcaggctaacgcattgctcaatatggggggctatgtccctgcaggtctgctgcctgtagcaacaggtttcctgatcgatcgaactgacttggccttcggcgcttatacgctggcgggtctgctcgctagctgtgccctgctcgccgcctggtttgttgcgagaaataagcaagaagttcaccactactgacgacctgggaggtcatcatgcgcacgacaaagtccacccctgtaaaacctaatccaatgcgtgtcagtcgtaacaagatgcaactaggggtattttctacgaacaccgagggcggctgtacggtgacgaatgcgcccgagcggattcgcggggatgactgggcgggcaatctggaaattgcaaaagacgcggaccgggcagggtttgaagcgttcattccggtaggccgttggaaaggatttggtggtgccaacaacaccggtggcgtgtgttacgaaacttacacttgggcggcgggcattgccgcattgaccgatcagatcgcagtgttcaccacctcgcacttacccactgtgcaccctctgtttgccgccaaacaggcggttacgattgaccacatcagcggcggacgatttggcctgaatattttgtgtggctggtacggcgctgagatgaggatgttcagcggtcacatgatggaacacgacaagcgatatgactacgctgaggaatggttgcacatcgcgcagaacgcctggcagcagcagacgccttttgatttcaaaggtgagtacttcacgatctgcgacgcgatctctcagccacagccactcaacaagccttaccttatcaacgctggcggctccccacgtggaaaaaggttttgtgcagaacattgtgatgcggcgttcttgatcatcaagcatttggatggcgaagcggcggtgcgtgaacagatcgcgtcctacaaggatctggccaaaaatgagttcggcagagacctcaagatctggtgctatggctacgttgttcaaaaagacactcaggaagaagctgaggcgtacctggattattacgccaaccaaatgggcgacgatgaaggatgtgacatcatcacgaccgagttgggcattcagaccgggattttcactcccgaggatgcggttcggttccgtttccacttcaaggccggttttgccggcgtaccgttagtgggcacgccagaacagattgtagagctcttcaagaaatattcagactggggcattgatggcatcgctctcacctggttggactaccaccaaggcatcaaggacttcgtagcgggcgttcaaccgctcatggaagcggcaggtttgcgcgagccgttcctcagtgatgcatcgcccgtgctcaacgaggcgcgcgaagctgtggaaatggtgtgatcgctggcccccaggcgaatgcacctgggggcccaactcccctttagagctccaacattttctgcggattggcaagggtcacttgcacgcggcgagcgttatccagctcaaacgtgtcaaaccaccgctggctttgttcgagccagtcgttgacgtccatctggctcgtttggcccaaatctgagctgtagacaacattggggacggtcgatagcacctcgcgaaagtcgtcttcttgttgatagcctaaaagataggtgagggcggtctgctcaatgaatacgttaggagccgtggcgatctccaaaagctcggcagccttcaaatcagtcaatggattggccggctggttgagcatcaggcgcggcacgcccaatcgaaccgattcatctaccagagcacgtacctcgcgagcgtcagcgtggccggtagaaatgaccagggggtaatcacacgccatcttgagtatgtccagggcctggggcgtcaagcgcccggcgtctgttgtgacgcgcagaggcttgatgggtttacttaccaacaatggatggctgacatttcgcgcgagggtactggtgtgctttcgtcctgtcaccgtcgggaagtgcacaatgaagcgtcccggttcgtcgccgcgcatgcacaggctacgctccaccaccctgaagtccacaccgcctgcaatctcattcaaaaccaaggaaccactgacagggaaaccctgtgagcgcgcttcccaggcctgcgcggcagtgcagcccaagtggtttttcaataccacccggccgttggccgctgcgtacagttttccggcatctattgcgccatggcggcgaacgaacgcgtccgggttcgcgtggtagtgcaggtcgataaagttcagggaatggctggtgtctttgagcgcgttcatgccgcgtgttccgagcgaggtataagaaaagtgtcgatagcgttcacaaccgaatcgagatcgtcagccaacggccgcatgcctcccgctcttatgcacagtgtgcgttggtggggtccagaggtgcgtaccacgtgcggttggttgacaagttgggagcgctcgccaaaaacgctcagaacccttccttggtatgccagtagactgtgactgagatcgataccggctaacaacccaaaaccacctgagaggcgctgcccctgtatttcaagatgaacactgttttgggtttctggactttgctgggggtgtttgccttcgggtaggacgagtgcatccagcagacgcttggcctcttcaacgtggccaagctgtgcaagttccgccattcttccaagcctggcatccaatatagcgtcggctttggctggggaagagagcagcaacagagccgccgttgacgcaagcgaggaggtacgcaccagttccagcgccagcgcgccgcccaaggcgacaccgacaagcacgtcgggtatgccccagggttgcagcaactcagcccaacgctcactgaaagtgttcagcgtctcatcgcaggcaacgggtatcgagagcgaatcaaacaccaccacccgatagcctgcgctgagaaaatgacctgtcagcggcgcgataaaggcgccctcgtcccatgtgggcatgacgggggaaagtacaaaaacgcactgttttccttgcccatacactttgaattgcacgtcctggttcattgtttcgctcctgcagaaataacaaagcctacttttacaagcaggccggttgtgccccgtgagtccgtttagagggtgcgtcccagcttggcgacagtatcggcatagcccttgagggtggcctcgactatcgagcgcgccggctgtacgtccttgatcagatcggccacctcgcctgcccagatcgctttagtccctacgtcgtctgttgccagtgcccgttcgtactggggccgcaactcatcaagggccagcgagaacgcctgctcgttaccaacccacgactcggaaaactggttcgcgatcgcccgaccgctgtactctgcgggccaagatattccgcgcacatcatcaaagatgcgagttctgacggtgtcgcttgcgacggcgtggagcagcctgtttttcacacgctcagagggaagcgcttcgtcgcaggccaggaatcgcgttcccatcattaccccgtccattccgagtgccatggcggcggccattcctcggccatcagctatcccacctgttccgatcaggattacgctctcgcccacggcatcgcgaactgccgggaacaaaggcatggaggatctgcgcaagctgtgccccccagcttctgcaccctgcacgatcaatgcatcggcaccggcgtcgagagcgtataacgcctggtcaacgtcatgtacttgcacgatgactttggcgttcgcttgatgaatgggctcgataaatggacgagcgtcaccaaaggacagcgctacaacctgcgggccgaactccagtgccaaatgcagtagctcgaaacgtttcgccaccgtgaacatgaccagcccgacgccccagggcttgttcaaatcctgcatgagcgacaactgttgaaccatccagtcaggatctccgtagcttgctcccaccaggcctagcccccctgcgtttgaaacggcggctgccaggtgtcctcctgatgcacctcccatcggtgcgaggaccagtgggtgctggatgcccaagaaggttgtcaatgctgaacggattgcggccataacttcttccttgatcgaatattgaataggcttgggtattgcgcagcgccaagcgctgcgcatgcgattgcagttagccgacagtttcgcgggcggtggcaggggtgatgtaggtggcgacggtgtacaagtgatattcccaggtaccggtttctttcaagcgcgaataacgtgataaaaactcttcgtcgatgaaaagcgattcgaactgcccacgatcgctccactgagcctggttgatgaccgtcttgccgtctgtgctcttcatcaaacggctccactgaaaggcactgtacgttcgcgcaacatagttgaccgtgtcctccagtatttccaccgcgaggtcctgcgcgccttcttcaacatgcaccacattcacgagataaatcgcggtgtcatcggaaacagattgaggatcaaacaattccattttcatgattatcttccaatagtgaaaaacgcgtgttcaaggcattacaggtatggaacctgtgggtttcccgtcctgccagagcagtggagtgatgtcttgcgccacgacaaggtcgtcgacgtgaccgatgattatttcgtgggttccatggctcatgcgttgggcaacggtgcagaaaagagaagcctgggcactgggcagatacggtaggccgttggagtgttgccagtcggctgtctcgaaccgggcagggccggtgactgcgccaccaaaaaccttcaccaagtcctcttggccaacccgaagcaagttcaccgaaaaccttccatgaccaatcagaggcctgtacatgcttgccccgtgattaatgcagacaaggatggaggaagggtctgtacacaccgacgttacggcggttgcagccatcccaaaaggtgcgccctcatgttcagtcgcaataagagtgaccgtggaggtcaggcgacgcatcgctttcttgaactcttgagtgactgaacccttgtctgtgaagcagtgcggtttcaacggcgcgctcaagaccctggcgctggcggatagctcatgcgaaaggctcattgggataactccgcttctaccttctgagcagcacccaaccaaggctggtcgtagcggtaggtcttgcgagcctcctctaatgacgcccccgcggttatcgctccgataatctggcgttcggtgtgttctacggcacgcgcacggcgaataacttcggccgctatatgctgcgcaatgacaaggcagccgctgccatcgcagaccagcaggtctccaggattgacggtgacgccaccgatctcaagcgagacctgcaccgctttgagctgagtccggttttttgcggactgcatgaaccgtccgcggctgaacaggggataccccagcttgacgacggtatcgatgtccctggccactccatcaattacagtgccttttatgcctctggccacggcgaagtgcgtcatgatatcgccccataccgtgcagtcttggcgccccgcattggagctgacgatcacggctccaggcgggacctgatcaatataattggccgcatttttgaacccatgagaatctccgaccggctcatactgcacggtaaaagcaatgcccacgcagcgactaccaggaacttgggtggtgatgcccagaaggccgccagaaacgccaaggctgtccagggcatcggacagtgacgcggtatccaattgttcgcattcgtccagcaatgcttgagagagttggaccgattcaaagagcttgggcatgtgttgctcccaggggtgaggttggaacgcaaggttgggcccagttcagcgcggccatggaaacgcattctccaataatggcttcgccaacctgcgcggtggagtgcgacccccccatgtcataggtgcgcacgcttgaacgcgccacccggctgaccgccgccgtcacgtattgtgcttcctgcggataacccagatgctcgagcatcagagcgatggtcatgaacatcgcgctgggattggctttgttgagccctgcatgggccggagcgctgccgtggaccggctcgaaatatgcgcccagctttccgaagttcccactcggggcgaaacccaggccacccatgacgcctgcgccgagatcagaaaggatatcgccgaacatattctcagccactacaacggagaaacgctccgggcgttgcaccatccaaagcgctactgcgtccacgttctcgattacgccctcaatgccggggtatcccttggcgacactttcaaatacacctcgagtgaaagcgctgctgtgacgaagtaccatgggtttgtctacgaaggtgacccggtcgaatccatgccgggacgcatagtcaaatgcgtattcgaagatgcgctcaagcccgctgcgcgtttgtaggcgcacggaaatggtcgcgtcctcctgcccttcacgacgccatggcgcgcccaatgcttcccgctcttgcagcaagggcaggaattgatcaggtatccgtccataatccagaccggcgtacagcccttcagtgttttcccggatgacgacaaaacggaatcgattttcgcccgtgatgtcagtgaccggccgcacgtttgcgtaaagatccaggttttgccttagctggatcaccgggcttacatagcggcggttctgcccctgaagatgagggggcagctctgcttctgtttcggcaaggggtttgctagtgatggcgcctaacaaggtggcgtcgcactgattgatcttttcccaggtttcatccggaacggtattgccctcccgcttccagcattcccaaccgatgtccccgaactcgagatcgaacggcaggttcaaggccttaaggactggcagtgcggcctccatgacttcgatgccaataccgtcaccgggaagcacacaaatacgcttgcgtgtcaggtagtcgctcatccagctatctcctgtgcggtcatggtgtcgcgaccgtaaacattcgcgatggctctgggtgcaaggcgtgcgacctgatcctgttgatgcatgatttcaagagcacgatactcggacgtcagttgaaagcgctcgacggtttctcgcatgcgttttgtactgtcgaacgggaagttatacgcccccataatgatgtccagcagagggcttgggatgttgttgaatgggatagacgccgcggtcaggttcgaaagttcaagaaccttgacgaggtcaaatccatgattagtgccaatgcgctcgagataggcgacgagcatgctcaagtgcaagttgccggcccctttccccatcccgcatatggacgtgtcgatgtactcggcgcccgattcgatggcagcggctgcgttagccagagccattgaaagattgttatgggcgtggaaacccaatggcactgccagtcggttggagagacgactgatcagtcgatcaacatcgcttgggagcatgtgcccattagagtctgcgaaacagatgatgtctgcgccagcgccctcagcgcgcaccgaggtgtcaatgacggcactgagcgtttgtgccgtcacatgggtgacattggcactaacgctgaaaccgtaatcgcgagcgagtgaaagagtggcaagcccttcggtcaactgctctcggcgtaagcaaactcggatcatcgagacgccctgctccttgagcatggcgaaatcctcgttacccacgtttttagggtggaccatcaccgcaagctcgattcggccaccgccagcctggcgaacgcgctcaataaaatcagcatttatattgctcgtcagtccatgctcaactttgggcgcgaacgaccccctgcaataaccaacctcacatacattaatcccggcctctgccaagcttgatgttattaccagggcctgttcgtccgtgaagttgaaattattgcgatatcctccgtcacgcagcgtgacgtccacaacttttactttccccatgataatttctcctgcggttgatggcagttaagaggtgggcacacatttgaccgaagatagttaatcccccctttattttttttgtagggggtgaccttcgttgggtatatagagccagccgaaactcattgcagttcggtcttgcaagcacctgttgaggtgttcggtattgatcctcgtcaatacgtgtagttttgtaaacgtgcgttaatcaccggtgcctgtgaattttttcccatactggatcaacgccgactgacacagggcgcttgatcagcttgttgcctttaatcattgtcgtagaagcaggcctcaacgtaattcatggcggcctggattgaggggatcgcacggaagtcttcgtgcacgcctagccagacgtccaccatcaacgggtctgcaagctcaagccggcaaagctgtgagctatgttgcactgcgaagctgggcagcagcgcaatgcccacgccggcctcggctgcccggacctgcagctcgaccgttttcgctttgaggacgcatggacgatccccgacaattttttttagccagtcattttgaggaagtgtcatggcttcggcttcgtagccgatgaactcatattgctcgggggagcggtcttggagataggtcttggcgccatagaatgaaaaggaggccgaacctatccgccgcgcgacaatgccaatttggcgaggcttggcgaagcgaatgcacagatgtgtctggcacttggacagagacgaatactggctatcgcctagaagacgcaaaactatgttcggatgcgttgaccggaaacgtcctaggttggggatcagtttctcggaggtaacggaaggcggggcgctgaccgtcacctcgacaacttgctgggtttgcgcggctgcgacagccagacgttcaatcgcctccgtttgagtctcgatctgttttcccaggtctgcgagtttgcgcccgaccgttgtaagttcgtacaggcgctttctacgatcaactaattttacactgagtgatttttcaagcgccgcgatacgtcgagacacagtagcatgctcgacgcccaagacacgcgccgctccactcaaggagttcacttgggagaacgccacgaagtaacggaggtcttcccagtttaaatgtgctgtttgacaggatatagctggctctgcattcgacgcgattctattcctggatgctatattcatttaatatttccttatatcaatagcaacggtaaaaaatgtcgggcacaaccgacggcgtagtaattatccaggcaggctcaatgctggataagtcctattggatccaatgtggaaactgaatcgcatcgatgttatgtgtttgcgcagggtctatgtgcgtcgcaaatgtcagatcacaaaggacaaaactgtccgatattttggtgactcgcgttgtgtttttttggtagggagagggcgatgcaattggcagatgtggagcggcgataggaggttaccgcgtcatcggggtgcgctgaagtgtagtgcttaatttccaaaccgcagaaaccacaaagccccgcattgcggggcttctagatatggtggcaccaggaatcgaacgattttataagttattgaattagctaattaatactcgaaggcctgtgcgattctacctctaaaactacctcagggtcctcttcttgcttgacgtgactaacggcgaagggccggagttgcccccacagcggccggtcattcgtctatcagagttgggccgttgatgcgtcaactgttaaccacggtagagttagggtaggtccatggtggccatggagtcagccatgcggtagcccatcgctttgtaacccgcctggcgcttatcccacatcctcatcagcgcgacattaccctcgtcaacgaagtcgatcactcgcacgtcggccttatcggcatgtgatcgatgcaaccgccccgcatattgctgaaggattcccttccatgagatgggcattgccagcaccagcgtgtccaacggcggatgatcgaagccttcacctactagttttcctgttgccaaaagcactcgtggagcatcagggggaagggactcaagctcatgcatacgggaaattcgctgtttcttaggcactcgcccatgaagcgtgaaaaggttatgcacgcgctgcttcaattctaattcaagggcatctacatgttccgtccgctccgttagcactagaatttttctaccctcgttgtacgccagctcaatctccgagacgattttggctgtccgctcagagtcgtcggctagacgccgaaaaacgtcctgaatcccaaagctgtcggggaccactattggtttgggcagcaatcgaggcacgacagagaggtcatggggcgcactcgctggtcgagcagcagaatgtcggatcggtccgcattgcataaaaataatgggctgctgtccatctcggcgcactggggttgctgtgagtcccaatacgtaccgtgcggtcgcgctccttagtagtgcctcgaatgacactgctgataggtgatgacactcatcaacgatgatctggccgtagttttttacctgatcgctgatctcgccttttcgcgatagcgactgcatgacggcaatgtcgatgatgcctgtaagcttcgcttttccgcccccaagagtaccaacgacaccattcccgactcccaagaacgcctgcaagcgctcttgccactgccttaacagttccgtccgatgcacaagcaccaacgtgttaatgccacgtgcggcaatcaacgcagcggcactcaccgttttaccgaaagctgtcggtgcgcagaggataccggtgtcatgacttagcattgcgctgatagcagcttcttggtcagaacgcagggtcccgagaaagctcacgtcgatggggtcgcccgcgaagcgttcgtctttaagaataggggtaaccccgttttcctctaaaagctccagcgcagcatccaaacagccacgtggtaacgcaatatgtttggggaagttctgggcacaaccgataatccttggcttgttccacactgacatgcgcattgcctgagctttgtagaactcaggattttgaaaggcagcgagccggacaagctggtttgccaatggctgtggcaattccgacttttcaaagtaaattaagttagcctgcgtgatgttgacagcagcaggcaacgggcatgtcaatttacgtgatctcgattcacgatttttccaaggttctgcatcaccttcgtcatcgacataggcgacccctaaagggtccagattacccatcgcctggataataacgggctggatatcttctggactcatgcgctgaatcgatgccaggaaggcccattgatcaggatgaggctcaagcgaatcgtctacaaaaacgctattgttttgggccctagcccgcttttgtaaagggagcgcgatgagatttccaaagccgcctttgggcatatagtcctggtttggaaacagtcgatcataggagctgagcgccaactgccgggtgcgctcacaggcatgactgatgattgcggcaccgaggcggcgcgcatcgcaggcaggaacattacgctcaaagaaaacccaggcatgagctccttggcctgagcgcgatatttccagcgccatcggcacgttcagctcatgacatgactgcgcaaaagccttggaatcatcacgccattcggcctcatcgaagtcgaccgccaaaaaataacaagtgtcatcaaagagtagggggtagataccaacgaccacttcgcccgccagatggcgatagaccacctcatcggtcagcggaagcagctggcggttaccgcagtcgccacatttaattcggggcttctcacaaacgccaggcctccattcgtttgcgcaagcgggtgcgtatcctgatttgcctgccttgctttcccagcggatgggataaacgtccgtcctaccacgaaacaagcttcggaatagggcaagctttccatcagtatcgagttgctgtgattgttctgcttggacaatcgctatcttgactggctcagcaggcgggcgccattcgatgccatgagcatccagcaaggctaccaatcttgcattctcagcctttagcttcgccaccagactagtgtctatcaccgccttcagcctctacgtctcaggtgaagcctgtagcctagagctacaaccctcggtccatcagtaaaacatagaggttatcaaacaacagaggttaggttcaggggctcaagaggtccgccctaatcccaatcaaattgttggctggatcaatctgccagttagggatacagagcgcgcagttgctggcattcggctaacgttgaaaattccaggattttcctaggcgcagagtgatcaggcttgtggtcagcaggtagtagtagcgcgtcgatttcgagtttgagttcatgtggtggttgggtgatctgctcatagcgttcgcacgcataagccgcacgcagttcgtggaagcctttgaggttgtgcgtatggaggatatctcgggcggatcggacgatctgcctttggaagacgaggtagatttcgttcggtgccagcaggttgctgctgccgtcgggcgagacctgttcggcgtacctacctggcttgctgtcaacgacagcgcttcccctgatctttcccaaacctatctgatcactcaaccccgcagcttcagttccctcacccgtttgatcacaaactgttcaaacaaatggtgcttggtgaccacatcgtacatttcatattttttgaatgctcggatgacggctccgcagatttctgcctcgtcgagcgctttgtttttgccataagcagcagcgagaatgccgttcatattctgcaaatatccctgcatgccagtgtcattcaggatgtgggtgaagacttcccgccacggccttgtgtctacttcccgtatgtcgcggccgatgaaggtccaggtcatgtaaaactggccgtctatttcaaagctttcgaaacggcagtctgtctgaaaggtttcgctgccgacttcggcatttcgttctggaggatacggtgccgtttgggatcttcgactgctgagaactctggatgcgctgtccacttgcacgcaaatcactggctgaataagcgggcgcaatattttattgaatgttgcttctttggatgccccggcgagggtaaggactgagcgcaagtactgctccacactggaggcggctttgaatgtttcacgcagccattcagatggcatcaacagctctgcggcgaagcgattggcttcggtctccatttggttgtaggcagcatcaacttcgcggttctccaagtgggagacgattgtgcctgtatgccatgggataactacgtgcccgatttcatgggccagtgtaaattttcgacgggtagcaggagcactcgagttgatcaggatgcgaggcttggtagcagcaccaatgccaatggtgattccgtccacgccgaacggcagttcaaggtactcaagctccccataggtagaggctagctgctctagatcgtacggcggtgtcagcttgcggatggccaggacgcgactggccattttctcttctggggtcactagatcttgcccacgctacgtagccaggcttcgactttggtcgcttcagcgaccgatcgcgcgcgcgcagcaatcgcaaatttgtcttgatcgagttggtccttaagagaggtgccgtacttgtgggcagtcaatacaaaaggtaagaccgacggggtggttgaccacagttggtactcttcccacttcatgcccagatattcatgcaattgcatgtcggcaccttgacgaccctcgtgccagtcctcgacgaattggtcgatctcttcttccagcacatcgcctttaaggcaaagctctacaaaattcatatgaacctctcagttcggtttgatccttcgtccgcggacggcaggtttcaaagcaagcccggtttcagggcagaccgaacccaggtgaaagccacgtcggtcgaagacttcaaactcgccgtgaagcgaatcccatgagtagtaacgttgctctacggcatcaaagtaatacttacggccaccctctacatacgcgactctgaaaccgctgacaatagaaggatcaggcctcggtttgccgcccatccgacgttcccttaatcctgaaaactggtcttggcatcttcgccaaggaggggcgggactataccgtagctggattggcatgggcggcaggctggagcgcggattcgtttcaagaaatcgcaagctgcaggtcagggggggcaggcgaaacgccaaaacgaaaaaacccgccagaaggcgggtttttcgcgggttccagagattttgaaagctttctctggaaccttgtatggtgccggcaccaggagtcgaacccgggacctactgattacaagtcagttgctctaccaactgagctataccggcgtgttagggcgacgattatagcgattggaaaggttctgtaaacccctgaattctgactatttttgcaaaatcgaaggtttctcgcgattagcgcgtttcccccgtgtcttcacaggttgaaaagcacacgcaaagttcggctccagctcgcgcagcagatcaagaccaataggttccagaccccctcctaaccagatgtccaacgagctttacccccttgccgaacacgccaaaacagcccgcataaagcgcccgttatgcgcctggcaccagatgcttatgcacaatcggttggtaacagctgtcacgaaacagccattttgtgcagcagttctcaacacgctgcaactgcctgttttgtgtgcactttattttgtgaacaaaaaatgaccagattggcttttggcgtgaagggccggtatctacggcctctgtaaagaattcatcaacagagttatccacaggtcgtgtgtaggattttttgccctttattggcgctcggccagcaccatcaagttgcgcggggtcaacgacgattcgcagaagctgccgacctcgacgttgtagccctgttccaccataaacagtgcccgatccagcaccaaccacagttccaatgggcgtcgaaacaagcctctcacgatttccaggttgcgcacctcggccaggcgctgccagccgtgggcctcaagtgccggccaatcctgttcgcctgtggataagcctttgaggcttgccaattcctggcaatagtcggcaaagggtttgttcagccaactggcgggcagggagggtgttggcaggtagtcgtcgcagccccgcagttgccgttgcagttggtcaaagcccaagcgccgggccatggaggtgtctcgttgttggcgtacgcggttgccggcggtgacggtttcgctcaggggcaggcccaggtcatcaatcgacagctgtagcaatgaggcgcgcccggcggcggaaagggcctgataactgtcggcggtgatgcggttgtagcagcagggcgctaatgccagttgtttgcagccggcggcgctggccagttgcagcaggcgcacgtgcaggtcgccgcaggcgtgcagggcgacgggtgtgtgttcgggctggatcgcgacatccgccattacgtcttgcagatgatgggttgcgggcaggccgtggcgatcactcaaggcttggccggaggcgatcagggcggggtcgtattccaggcaggtcagatgttggccgggttgcagcaggcgacggcctaggtggcctttgccggcgcaccagtccagccagtgggcgggcgtttgggaaaaggtcagcgcggcgccgaaggcttcgatctgttgccatttgcgcccgggcacgtcgacattcaggcgatggcgagcgggttcaagggcgtgtgtgggcaacttatccacagtgccgaggcgcagcgcgtcagcggccagttgtggaaaaggcgcgggcgcgggcaggtcgtgggggtggttgtgactggcttcggcctcggccagcgagcgctggcgcagccattgggataaggctgggtgcacggtttcccagggcaactgcagctgggtaaagggccgtggtcgccacagcccttggtgttcggtcaggaatgcatccagtgcctggaagcgtgcctcaacgtccttggcatgcatcgacgcgcagccatttttccagcagtttgaagccgcgtaccagtacgtaggccatcagcaggtagaacagcccggcggcgaagaagatctcgaccggcaggtaggtgcgggcaatgatggtgcgcgccatgccggtcagttccagcagagtcacggtgctggccagggcgctggccttgagcatcaggatcacttcgttgctgtaggccggcaggccgatgcgcgaggcgcggggcaggatgatgtagaacagcgtcttgggcttggacatgcccagggcgcgcgccgcttcgatttcgccaggcggaatggcctggatcgcaccgcgcaggatctcggcaatataggcggcggtgtgcagggtcatggtggcggtggcgcaccagaacgggtctcgcaggtacggccacatgaagctgttgcgcacggcgtcgaactgcgccaagccgtaatacaccaggaacaactgcaccagcagcggcgtgccacgaaagaagaaaatgtagccgtagggcagggcgctcacgtaccagcggcgcgaagagcgggcgatgccgagtgggatcgccagcagcaggccggcgatcacggcgattgccaccagctccagggtcagtgtggcgccctgggccaacttcggcagccacttgatgatcacggcccagttcaggcccaggtcaaagtgcgataaccagctgtagtcgccgctcattgggtgctccttgcaaagccgcgggcggcgcgtttttccaggaagtgcatgctggtcatcgccagtacggtcaggcccaggtacatgaacgccgcgaccatgaagaaagtgaatggctgcttggtcacggtcacgccgatttgcgcgtggcgcatgatttcttccaggccgatcaccgacaccagtgcggtgtctttcatcaggatcatgaacaggttgcccaggcccggcagggcgatacgccacatctgcggcatgatcagccgggtgaaaatccgaaacttcgacagccccaacgccacgccggcttcgcggtggcccttgggaatggcgagaatcgcgccgcgaaacacttccgttgcgtaggcgccgaagcacaggcccagggcgatgacgccggcggcgaaggcactcagcgacaggtcggggttgccaaaaaactcacccagggcgcgcatcaggttgacggtgccgaagtaaatcagcagcacccacagtaattcgggaataccgcgaacgatggtcgaatacgcaccgcccagccattgcagcggcttgtatggcgaagtcttggccaaggcgccggcaaggccgagcaccagccccaggcacagggccgtgagcgccagtttgacggtcatcagcgcgccggcggcgagggccgggccgaatccgtagagatcgaaattcatggtgttttcatatcgcggcaggcattgctaaaagccgacgcgctcacaggagcgcgtcgggcaggtcgttcagatcattcgatgctgaacgggaagtacttgtcgttgatcttcttgtaggtgccgtctgccttgatctctgccagggctttgttcaggcgctcgcgcaatgggtcgcccttgcgtacggcgataccgatcttgtcgctttctactaccgggtcgcctttgaattcataggccgaaccgtctttgctcttgagccattcgtactgcacgtacttgtcagccaggatgccgtctaggcgaccggaggtcaggtcgaggtaggcgttttcctgagtgtcgtagagcttggcttcggtgtccggcagcttgtcttccaggtaggtaccagccagcgttgcgcgctgtgcaccgatcaccttgcctttcaggtaagcggcgtcggtcttgaagtctgccgtggctttgggcgcaatgaactgcagcttgttcgagtagtacgggtcggtgaagtcaaccgcctgcttgcgctcgtcggtgatcgacagcgaggacaccaggaagtcgaacttcttggcgttcagggccgggatgatgccgtcccagtcggacacatacacttcgcacttctcgactttcatcttggcgcacagggcgtcgccgatgtccttgtcgaagccgacgacattgccgctggcgtctttattgttgaacggcgggtaagccgcttcgatccccatcttcaaggtttctgccatggccgtggcgctgaacgccatcgagacggccgcggccagaaggaattttttatagttctgcatgcatgttgctccgttagcggttgctggacatgaattgtttgcagcgcgccgaaagcgggttttcaaacacctgctgtggcgatccttgctcttcgaccaggccctggtgcaaaaacaccacttcgctggatacctgacgagcaaagcccatttcgtgggtgaccagcagcatggtgcggccttcttcggccagtgcgcggatcacattaagtacttcctggaccatttccgggtcaagcgcagaagtcggctcgtcgaacagaatgactttaggctgcatcgccaaggtacgcgcaatcgccgcgcgttgttgttggccgccagagagttgcgcggggtaggcgtgacgcttgtcggcaataccgaccttggccagcaaggcctcggccacttctattgcttcagccttgctttggccgagtacgcgccgaggggcctcgatgatgttgtcgaggatgctcatgtgcggccagaggttaaagttttgaaacacaaaaccgatttcgctgcgcagacggttgatctgcttgccgtcggcggccatcagctcgccgtttttcgcggccttgagcttgagttcttcgccggccaccaggatctggccctggtgcgggttttccagcaggttgatgcaacgcaggaaggtggacttgccggaacctgaggaacccaggatcgagatcacatcgccgtcgcgagcggtcagcgagatacctttgagtacctcaagctcaccatagcgtttatgcaagttgcggatttcaagcgcgggcgtggcctgggccatgtgcggtcctcattgtgttcgttgcgatcttcgctgttgggccgccttcctggcgaggcgccaagctagcatagcgtttggatgacagccaacagcgctgcggacggttaaccgatggtctgcggcagggtgtcgcatcggcgcagcagtgtgtcgcgccatcaacaacctacagacgtttgacccggaaagatccacaggcttcgcgtaaaaaagggcgcgatggtgccagctttggccgggtgttggaagggttaaccgggcaaacggtccatatcagcccgcttatggggcgtcacgtactttttgtgtgtgtttttggtgcgtcggtacgtcgtgaatgtgggtcgcacggtaacgctatagcggaatgccattgttctcaatgacttgcgataggttgcgaattgtcctacagcccccgtcaactgtggctatgaaatattttggcgcaaatcttgcgtaaaaaataaagaacgccctgttggattattttcacgagaaaggctgcaagccgggcgaaccgttttcgcaattcctcgcaaaggtgtgtcaatgagtagtacgcaaagctccaatgacctcgaacaggggctcaaaccgcgtcacgtcaccatgctgtcgattgccggtgtcatcggcgccggtttgtttgtcggctccggccatgcgatcgctgctgccggcccggctgtactgttggcctatgcagccgccggcacgctggtggtcttggtgatgcgcatgctggccgagatggccgttgcgtcacccgataccggttcgttctctacctatgccgaccgggccatcggccactgggccggtttcaccatcggctggctgtactggtggttctgggtgctggtgattccgctggaagccaacgcggcggcgaccatcctgcacgcctggttccccgacgtggcgatctgggtgttcaccctggtgattaccttgttgctcaccgcaaccaacctgttcagcgtgaaaaactacggtgaattcgagttctggttcgcgttgatcaaagtcgtggccatcgtcggctttgtgatcctcggcctggccgcgatcttcggcttcttgcccaccagccaggtcagcggcgtttcgcacctgttcgatacccaaggtttcatgcccaacggcatgggcgcggtattggcggcgatcctgaccaccatgttctcgttcatgggcaccgagattgtcaccatcgccgccgccgaatcgaagaacccgggccagcaaatcaccaaggccaccaattcggtgatctggcggattggcttgttctacctgttgtcgatcttcatcgtggtgtccctggtgccttggaacgatccgaccctggcggccgtaggttcctaccagaccgtgctggaacgcatgggcattccgaacgccaagctgattgtcgacctggtggtgctggttgccgtgaccagctgcctcaactcggcgctgtacaccgcctcgcgcatgctgttctccctgggccgtcgaggtgacgcaccggccgtggccaagcgtaccaacaagagcggcacgccttactgggcggtgttgctgtctaccggtgctgcgttcctggcggtattcgctaactacgtcgccccggcggcggtgttcgaattcctgctggccagctctggcgccatcgcgttgttggtgtacctggtgattgccgtgtcgcagctgcgcatgcgccagaagcgtacggcggcgggcgagaagatcgtcttcaagatgtggctgttcccaggcctgacgtacgcggtaatggtgtttatcgtcggtacgttgaccatcatgctgttccaggaagcgcaccgggtcgagatcatcgccaccggggttctgagcttgctggtggtattggcggggttggtagtggctagccgtcgcaaggctcaaagagtgggggctgcggcgcttaactgacgagatacggtgaatagggcgccacaaaacaatgtgggagccggggttgcccgcgatgacggactgccagtcgatgtattcgtcgcctgacactccgccatcgcgggcaagcccgctcccacatttttattttgtgtcagtcgggggcgttggccagggcctgggacgccgccacgtaatcggcctggaactgcggcgactcaatccacgccagcgcggcggcctcatcatcgctgtccgtcgcccactgccgatactcgatcagcgccgccaggataaagtcggtcgcttcctcttcgccttcctgctccagcaccagcgccagcaacgggtgcgccaggaataccgcacacagcgcctgctggctgatctcgccggcggcacgcatttggacgaacagctcagtcaaatccaccgactcaaggtcgatgcggctgtcgtcgcccgcgaaagcatctggcttgggcgccacggcgcgctgggtgcggttttgcttggccttggcttttgcccggtgggcgcgtttttgctgcttgtttggcgaggccatgggctcgacgtccttggggtttgggtctagagggtgtattgaagcgcaggttggggtaaatcccaagggtttctcgggcggcagtgactgctgtagtgctcgaccttctctgcgcgggtacttaggctgacagtctaatgacccaccagagcccgcccatgacccgcgacaccctggaacaccatcaggtcccgatctacttcgttgccgtatttgtggccgtcacgtttggcctgctctggcccttgtcggcgcagggcctcagcctttgggtgacacctgctatcgccgtgctgatgtatgcgatgtttttgcagatcccctttcttgagctgcgccaaggcttgggcaacaagcgcttcatggcggccttgcttctggccaatttcatcctggtgcctgtgctggtgtgggggttgacccgcggcctggtggagcgcccggcattgctggtgggcgctctgctggtgttgctgacgccctgtatcgactatgtggtggtgtttacccatatcggcaagggcgactcgcggtcgatgctggcggcaacaccgctgctgctgttgctgcaactgctgttgttgccggtctacctggggctgatgttgggcgagcaatcctccgtggtggtggctgcagggccttttgtcgaggcgttcgtggggctgattgtggtgccgatgcttctggcggttgtgaccagcgctttcgcgcggcggtcgagcgccattagcctttggaacagcgcctgggcctggttgccggtgccagcgatggccttggtgttgtttgtagtgctggcttcgcacatcacggcagtggtgcgggatatcaatgtgttactgccagtcattccggtctacgtggcctttgtattgctggcgccgctgatgggcattgtggccgcacggctgttcgcactgccggcgttgacggcgcgggcggtgaccttcagtgcgtcgacccgtaactcgctggtggttttgccattggcgctggcgctgccggaggatgtgcgcggcttggccgcaacggtggtgatcctgcagaccctgatcgaactggttgccgaattgctctacgttcgcctgatcccggcagtggtgtggcccaccagccggtaactgcgtgaatgttcaggtctgttcaggcgccattcaggggcgcgttcggcaccatacgccagcgcttcccacctgacaggtcacccgatggatcaccgcaaccgttttcgcctggagtcactgggtattttcctggtcgctctcttgttattcacagtgggcatctgggatcagcagccccagggttttgacgggcgttgggcgctgttcatgcaggaaatgtatcgccatggcgcgagtcttttccccaccacctacggccagccttacgcggattaccccggcaccgcgactttcttcagttatttatttgcccgcttgtttgacgcgccgaaccacttggcaaacgtgctgcccacggcgctcgcatcggcgggggtgattgcgctgatgtaccgcctgctggcgccctacagccgtgcctgggcgctgctgacggtgttactgactctgctcaccgcccagttgctcgaaaagtcgcgctcggtgtgcctggaccagatggtcgcgttgttatgcgtggccagtttctacctgctgcacaccggcgaacaccttgggtcacggctgcggcaactggcggtgttcccgttgttcgtcctgggtttcgcgatacgtgggccactggggttgattgaggtctgcgctgtggtgtgtgtttattgggcgctgggcaagcctggggagcgtgtccggcaggtgctgatccacggcgttgtcggcttggtgttactcgctgcgtgctggtggctactgatgaagcttgcgcggttcagtggcggcgatgcgttcgccgatgaagtcttcaagatgcaagtcggcgggcgtctggatgagtctggtgagccgttctacttctatttccaactgagcttgtaccgctactttccggtggtgccgctggcatttgcgaccctggttgcgttgcgccatcgctggcccgaacgctgggccaatgagcacctgcaattgctggtgcggttggggggctgcggcttgatgattctgctcggcctgtcggtaccgcacttcaagcgcgcttattacattttgccgatggtgccgatgttcgcggcggtcgcagcctttgggctactgcatgcgcaaggctggctggtgcgcgtgcgccgtggctacgagtggctggtcgcggcgctgccaacgttatgcgtggtggtgttgtttgtgtgccgacacgcctggcacaagcagggctactggccgcagatttccttgccgttgatgatcggcgcgttggtggtgctgcaaatcgcggcgttgattgcctggcggcgagcatggcggttggtgtggctcagtctgatcgcgctggtggcgcaatggctgttgctggtgacggtgatagagccggccaaggacctgcaattcgatactcggcggtttgtcagccaggtggaggcgttgcgtgaggcgcagccgggccctttggtgtttgtcgacctggcgcgagatacctgggctgtgcgctacatgatgaacctggatcacgatgaacagccgctgtttgtcgggcgtcgcgagcttgagaagctggcggtgctgccccggccttcctgggtgattgtgtcgcgcaaggagactgcgctgttgaaggggtcgccggtggagcacctggcaccgagctatcaagggcgcttgaatgacaacccgttgatggtgtttttgctcaagtaaggaggcccttgagccaagggcctgccgagcagctgattacttgcaacggaagctttcaggcatcgtgaccgtgtaattgcgctgcacacggtcctggaaattcaggttctgcaaaccctgctgtaccagaaaggcttctaccttggcggcttggcagtcgtcgttataggacgacgcccgtagcaggtagaccgcacgcctgctcgcttcatcgcgagcggtgacccggaaggtggtgagcgtggtgtagccggtgcgctccgaggtccctaccgggccgtaggaagtgtttggggtgctggtgcaggtcagttggtcggtctttttcttgttcttcttgcattgggtggtggtgctgtttgccacttgcccgtattcggtggcggtgtagcgatacgtcacctgcttgctgtcgacatccagggtgacggtcattttgatcggtgcatggttcttgggcagtgtggtgtcggtatagacgttgcgaaagccctggtcctgcatggcgcgaaccatgtcgcgcaggtagtagcgggcattgagcgagttttcatcactgccgccagtggaggtcaccagcacggttgcctggcggtcaaagtggtagtcgggatcaggcgttgcgttgattgctacgtccaactgcgtggcacacccactgagcagggcggtcagtattaatagggtgcaaagcaagaagcgggtcatgaaaaaaccttacaactgagatttgggtaaaggctgaacgattgaacccagagaaaaataaccagcacggatgataaaagcctgatggcttccctctgccaatcgcaggcactaggccactaaggatacagggcagcggtcttgatcgtcatggcacccgtggttattcagccttctgcggggctggcaaccatccaccaccgtcttcgaatttctcgatcaggaagtccacaaagacccgcaacttgggtacggcaaacttgctcggcaagaaaatcgcatgaatgctgtcgccgaacgtaccctctgcaatgtacttgggcaaaatcacgctaaggctgcccttgcgcaaatcgtcggcgatggagaacgtgggcagcaagcctatgcccacaccttccatcacggcctgcctcacagactcactgctgttgacacagaaacgccctgatacgcgcacttcggtcacttcgccgtcgcgaagaaaacgccaggatgcttcccgcgccaggccattgatcaagcagttatgtgcggccaaatcaccgagagtggcgatgggggagtggctgcttaaataaccgggtgttgcacataacacgtagtcgagtttggctaagcgtcgggctataaaactgtcaacgggcgtactggtcagacgtatcgcaatatcgaacccctcttcgacaatatccacatagcggtcgctcaaagagagcgtgacgctgatatcggggtaggcgttgaggaattgcccaaccaggttgctcaagtggagattgccaaaggcaaccgatgtggtgacccgaaggtggcctcggggtgctgattgcaggctttcgacagagttgagtaatgcgctggtttcctcggtaatccgaacaccgtgctgataggcaagttctcccgcttctgtgagcgcgaggcttcgcgtggtgcggtttaacaacttggccccgagcgtttcctcaagcctgcgcatttgtttgctgacggttgaggtggtcgaaccgaagaaacgggccgctttggagaaacttttcagttcgacaactttaacgaaaacaaagacatccgaaatattatctgagaaagattccattgtttctccagaggacacaggcttgttctttttggccgtattgtgcgcagcgggtgggttaaatactttgaattctctagcggttaaaccttggaggattcatgaaagccctgaccagaagtttcaatattgccctgcccgccactctactgcctttgctcttcatcgtcatgtggagttccggttatgtcgttggcaaagtggcactcccctttgtcgggccctacaccctgatcttcattcgctttgccagtgccgcgctgatcctgctgggcgtggcgcttgcgactaaagcaccgtggccgaaatcccgcgctcagttcggccatctggtggtggtgggtatcctgatccaggcgcttcagtttgctggcttgtacatggggctggatctgggcgtgtcggctgctgtggccgcgctgattgtcggtacgatgccggtgtttaccgcgttgggcgccacccggtttcttaacgaaaaggtcagtcgtgttgagtggctcggcttggtgggcggattgttcggtgtggccctggtggtctatgaacagctgggtgtaagtgcaacggcgagcctgacaggttacttgtgcgtagtgctggcactggttggcatcacggccggcagcctgtatcagaaaaaatactgcaccggcatggacttgcgcaccggcggttttattcagttggccacggcctctttcgtgatgttctttctcgccgaccactttgaaaacctcgcggttcagtggaccccaacgatgatcttcgcgtccggctggttgtcactggtcaactctattggcgctatcagcatcctctacattctcatgcgcaaaggtgaggcgagcaaagtagcaggcctgttccatcttattcccgcagtcacagccttaatgggctttgtattcctcggtgaatcgttcagtgcaattaacgcagtgggttttgcgattaccgcactggctgtttatgcgtgcacccatgtcaagaagtgaactcaacgtttaaccccccctatctaacgcctctttatccagcgaacaaggaagtatcatgcataccggacaaatccttaaagatgtactcaacgcagtacgcagcaaagaagccttgccgtgggtgccttataccgccaatggccgaaccaagaccgacatcgtgcatttgtaccaaggcccggaagtggatggcccatcagcggccctggtacgttatcagccgggtgcccgtacccaacgccaccttcatcctggctacgaactgattttcgtgctcgatggcgtgctgcataacgatgccggtgcacacccagccggcacgcttgaagtctgcccgcctgacagtgagcatgcgctgtggagcgatgagggctgcaccttcctggtggtgtgggaaaagcccgtgcagaccgtttccctggcgcaggcgcaggcatgatgggcgccctcaatagcggcttcaacgtccaggcggccccgggagctgcgctcgcagcggcctcgttcggcagtgattacgtaatggagccaaagcgcgtcattaccgccagccaggcggccgccctggtacccgataactgcacgattaccactggggggttcggcagttgcgggcaccctgacttgctcaccgaagcactggcggcgcgctttgccgctaccgcacagccatctgacctgaccctggtttttgcggccgggcagggtgacaaggccagccgtgggctcaatcaattggctgtcaaaggcctgctgaaaaaggtgatcggaggctactgggcgcttgcgccgtcgataggccagatggcactgcgtggtgaaatccaagcgcacaactggcctcagggcgtgataagccacttgttccgctcaatcgccgggggcaaaagtggggtgctctcagggatcggcttgcacaccttcatcgaccccaggcaggaggggggcaaagtcggcccggctacgactgaagagctgatctcagtggtaaacgttggggggcgtgaagaacttttctatccgtcgatgcccatcaatgtcgcctttttgcgcggaagccgagcagatgtcgacggcaatatcagcatggaggacgaagccaactttcaggacagcctcgcccaggcgcaggccgttcacaattgcggcggtatcgtcatcgtgcaagtgatggaattggtcgaccgtaactcgcttgatcctcagaccatccgtattccggggatctttgtggattatctggttttatccacgccagacacgcattggcaaacctacggtgaggtcagaaacaacacctataccgggcggtcacgctctgataccgccgtcacgccgttaccgctgtgcgccaaaaaaatcgtcgcgcgccgagccctgtatgaaatagcccggtacaacgcgccgatcgttaacctgggtattggcaccccagagttcattgcaagggtggcgagcgaggagcgctgctccgcccatgtgcttactgtcgagtcaggggttatcggtgggacgcctgcgcgcgggctgtcattcggcgcctcgagcaaccctcaagcgatcctcgatcaagccagccagttcgacttctatgacggtggcggtatcgatctggctttcctcgggtttggtcaggccgacagcggtggcaatgtcaacatcagtcgattcggcgggcggctcaacggtgtcggtggttttatcaacatttcgcaaagcgccaagcgcgtagtgttttgtggaaccttcacggccggtggtctggagctggggtttgaatccgggcagttaagcattgagcgtgaaggggatatcaccaagtttatccaggccgttgagcacatgagcttcaatgccgcacatgcccaatcgcgcaactgcccgattctgttcatcaccgaacgggctgtgctcgtattgaaggacggccgcttgatactcaaggaagttgcgccgggtatcgacatcgagcgcgatattctggctcgcagtacggccgatatcatcgtggctgaccacgtggagttgatgcccgcgtcgatttttctccatcagccgctctctgtcacggacaagtactggcgttcgcgtgactaactcatcatttcattgatggctcttcattcttcgcactacgcgttttggaaaacaccatgaaaaaaataacaattgccatagtgggcggtggttctgtcggcgttgcatattttacgcaactcattgatgaagctgttcgtcaggggctgagtcatcatttggatgtgctgatctttgagtcacagaaaacacctgggccgggttatgcgtaccaggacgactttgagtgcaacttgctcaacacgcgagccgacgccatgtctgcggtagcaggcgacaagcggcattttattcgctggctggaacagcatggcgcagatcaggcggtagattttccacaaacagtcatcgacgatcacgccttcctgccgcgcagcctgttcggcagatacctggcacatcagtatgagcagacgatggccgtggcccgcgcccatggcattaaggtcaccgcagtgacctcaaccgtcacagacttgatctcactgtctgaccagcgcccttgcattgataccgagagcggcgtggcttacgtggcggatcgggttgtgctcagcatgggaaacctgccatccacgcggtttactcagctcaatgatgtggctggcttcgtgcgcaccccatacccgacacgggacatggtacgcaacataccggccaacgcatcggtgtgtgtgctagggaccgggctgtcggccattgacacggtgctctcactgacggaagccgggcaccaggggaaaattgtcatggcatcgcgcaccggccgcctgcccagtgtgcgcggcacctttaatcggcctcatacactgacgcatctgacccgagcccacatcgataacttctgtgatgtaaatggtggtcagctcaagctgcatgacgtttttacgatgttgctgcgtgagatcgaggaggttaccggtgacgccttggacttgaagcgcatcttgaattcgggcgccggtgtgttggactacataacgtccgagatcatgcaggcagacaatgccgagcgcctgtggcagtcggtcatttactcgaccaactccattatcgactacgtctggcaccgtctgtcccgcgacgacaagcaggtattccagacgacattcggcagtctctggtcttcttaccgcgtctcggtgccggtcaaaaacgcccataagttgcaggcgttgctgaaggctgaccgcatactggtgctcggcggcgtcagccaggtcacttacaacgaggcttcaaaggtctttgagacgcgcattgacgaccgtcgcagtgcattccgtaccgtcatcgagagtgagtatgtcatcaacgccaccgggtactccgttcaggtggaacactctgacgtgccgctcgtggtgaatctgctccgtcgcaagctggccaagcccaatgagttcggcggctttgagctggacttcgagacaggaaggttggtgggtgcagccggtgaggcctggccgcatgtctcggtacttggcagcctggccaccggcacgtacttctggacgaatgcgatggacgtcaatgtcaggttggcccggcgtcaggttgaagatgcgctcagcgtattgtcaggcagcatctctcacacggcgttgccttcggcgcgagtacctcgtcgtcgctctgtcactcgaagaggtcgcacggcctccgcttcggcgagcaccaggcagagtagacgctacggcctgaaggctgctcaggggaacgcaagcgtgcttggggtacccgtgcgaggggaactggcgtcgccgacgactcagctggtctgagggcgctttgagcttggccatttaaatcaggcccgcgcagatcgtttcggcttcgggacctgaagccggttgaatcgcaggcaataaaaaaccccaaggaactgcttccttggggtttttcggtattttggtgcccagagacggaatcgaaccgccgacacggggattttcaatcccctgctctaccgactgagctatctgggcaacggggcgcattaaacgggtttttcagggggtcgtcaagcaagttttcaaaaaatatttaattattaccgtcgcttacgtgccaaccccggtttttgatcaattattgagcaggtgggacgtagccttcagcctgggcgtattcctcgccggaaaagaacttgtccatttcgccggccaggtatttacggtcttcggcattcatcatgttcaggcgcttttcgttgatcagcagggtctggtgtttcaaccagtcgccccaggctttggcggagacgtggtcgtagatgtcctggcccttggcacctgggtacggagggcgttccagggctggcagttcttctttgtacttgcggcacataacggtgcgggtcatgacgaaactcctgcgttcaatacatcggccgcgcgcttcagcagttttttcaccggggcggcaaggcccaggcgcggcggggtggcgaggttataccagagccagtcggcctcggccacgtgatgggcggattcctcaacctggaccagccagggttcgatggccagctggaagtggctgaaggtgtggaccagccctggcagttcctgatgcttgcccagcgccagcgcgtgctggttggcgaggtgatccaggtcttgcaggtcgtccagctccggcaagctccacaagccgccccacaagcccgtagacgggcgacggtaaagcaggatggcgccttcggcgttggccagcatcggcatcagcgtgcgcttttgcgggatggtcttgcgcggcttggggatcggatagcgcgtctccagcccgagcatgtgggcttcgcagcctttttccagcggacacaacaggcaactcggtttgctgcgggtgcacagggtggcgcccatgtccatcatggcctgggtgtaggcgttgacgcgttcaaagggcgtgaagcgctctgcggtggcccacagctgcttggccaccttgggttcgccagggtagccctcttgggcggtaaagcgcgccagcacgcgtttgacgttgccgtcgaggatcggcgcgcgtaggcccatgctcaggctggcaatcgcgccagcagtggacaggccgatacccggcaactcggtgagcttctccacgtcgcgggggaattcgccgccgtgttcggccaccacgatcttcgcggtcttttgcaggttgcgcgcccgggtgtagtagcccaggcccgtccacaggtgcagcacttcatcttccggcgcggcggccagggcttcgaccgtcggcaaggaggccatgaaccggtcgaagtagttgagcacggtgctgacctgggtctgttgcagcatgatctccgacacccacacccggtaaggggtgatgccctgctgccagggcaggtcgtggcggccatggcggtcgtaccagtccagcaccgcttgtgaaaactgctcgtttctcatcggttgaacaggcctttcaatgcgtctttgagcttggggttaaccttgtcgagcttctcttccagcttctcgttaaggcgattgccggccgccttgagggcgacctggcccaggccgtccttgtccaggcggcaggccttggcgcccagctcaagcgggccacggcagcgcagcggcacttcaatgccctggaagttggcgccgacctggcaggccgggtccggcatgtcgcgcttgtcgccttcgacgatgatgcccacgcggtagtccatgcccagcacgcgcaaatccacatcaccgttgccgttgagcgtgaggcccgggatacgcactttcaggtcggggttgctggccacgccgttacggaacgtgaggttgccgcgcagttcctggaagggcgtgtccttgccgcctggggtggtgctcagggtcttgcggttgagcagggcgattccggtacacagctgctgctcgatgttggcattgagcaacacgccgttgttgatcacgaggctggcggtaccgttgaggctctcgatcagggctttctggctattgccgcggccgctgaggttgctgtcgagggtgagctggcctttgaccggcggggttttcccttgggcctgcaggatgcgttcaacaggcacctgcttgatgtggctttgcagggccagcacgggtgtgtcctggcgtacgtcaagtgtgccgttagcctggaacgtgccgttgtagagaccgccgctgagagtgtcgagcttgagttgcccgtcgatgccggaagctttgagcaccgcgttctgaatgggcagttggctcagggtcagctcgccaaaggccaggtctgcattcacgtccaggctgcgcaggcgcgtcagcggcagcagtttgtcgttgctccaggcacctttggtcggcgcctccggcaatggcgtgttgccgcctgccgccatggcgccggcttcgctgctctgtacttcggcctggcgtgcggcggttgcacctttggcagcttcggatttggccggcaggtaattgtcggcattgaaagtatcgcccttgagctgcacacgcagtgactgcttggcgaaatcatccacggcgacgcggccggtgaaggtgctgccatcgagcttcaggttcaggtcttccagggcgacgctggtgggcgtgcccttgaggcggctcaccagctcgaccttgctcaggctgcctggggccatggcaggcagtgggtggccgatgctctcaagaaacttggccaggtcaaactgggcgaccgacagggcgccgctgatctgcggggtcttgtccaggtcattggccttcagttcgcccaaggcgcgcagttggttggccgccagtttcaggttggtccattcggcgacgttggccgccaggtccaccagcaattggccctgggtggagaaactcaccgtcttgccctgcaacggctcaccagtggcctcgccactcaagcgcatgtcttcgaactgataacgcttgagcgcacgctggatgcgcaagttgccgttcagctcagtcttgacccgcatcagcggctggttgctgcccaggaaggccgtgagtttcagcgggatgctggcgccttcgtggatagcaccggcactcagctggatgctctcggcactaagctgcttgccggtctgttcatcggtgtattcgacgcgggcattgttgatggtcaggctgtcgatatccaggcggatcggttgcggcggtttttccggcttggtttcagccacgggttcgaccggcgcgggagcgggggtgcctgtggtttcgtcgggcaggttcttgccgatgtcttcccagttgccatggccctgcttatcgcggttcaggcgcaggttcaggccttcgacacgcacatcgctcatctgcacttcgcggcgcagcagcggcagtacgcgcactgacaggccgagcatctgcaagtcggcaaacggttgagtcggtgcggtcagggtcgcgacgctggcttcgtgaagctccaggcccagccaggggaacaggctccagccgatatcgccattgagcgtcagctcgatgtgggccttgtcgcgggctatctggcgaatttcttctttgtagtcgttgggatcgaaaaggtgggtcagggcaaagccgagcgccacaatgatcagcaacagcccgagaagtaccagacccaggattttgccgaacgctttcatgggcgagtccttgtatgtcgatttcaaaatgtagccgcagagtataacgcccgacggcccgcgtcagttcacggatcgttacattgtatccatgggcgcggaaataggattttgacgtcagaaaaatacagataatccaaaaaaggtagtggcagtttgatttttctgtcatccactggtgctaatctctgcacgttcgtccgccttctgcgacttaacgtcgcgcctaaaagggagttccactcaacaaaacggccacgctttgcgtgcaaggccgagggagagagcgcctgacggacgcataccaataactgggggaaacaccaatgagcactagcactgtggccggcactgacgccgcacagcctgcgttcctgtccaaggagcgcatcatcgccaagccgggcttcaaccgctggctggttccaccggccgccctggccatccacctgtgcatcggcatggcctacggtttctcggtgttctggctgccgttgtccaaggcgctgggcatcaccgcgccagtggcttgcgcaccggacatgggctttatcgctcaagtcttctcgtcccaatgcgactggcccatctccatgctgggctggatctacaccctgttcttcatcttcctgggctgctccgcagcgatctggggtggctggctggaacacgccgggccgcgtaaggccggtgtagtctccgcgctgtgctggtgtggtggcctgctgatctcggctttgggtatctatacccaccagatctggctgatgtggatcggctccggggtcattggcggtattggcctgggcctgggctatatctcgcccgtttcgaccttgatcaagtggttcccggacaagcgtggcatggccaccggcatggcgatcatgggctttggcggcggcgcgatggtgggtgcacctttggccgcggcgctgatgggccatttctcttcaccgaccagcgtcggtgtatggcagagctttgtggtcatggcggcgatttacttcgtgttcatgatcggtggcgcactgctgtatcgcgtacccccgaccggctggaagcctgagggctggaccgcgccagcgaagaaagccagcaatgcgatgatcactcaccgtcacgtgcatgtgaatgtcgcgtggaaaaccccgcaattccgcctggtatggctggtgctgtgcctgaacgtgtcggccggtatcggcatcctgggcatggcctcgccgctgctgcaggaagtgttcggcggcaagttgctgggtgttgatgtgccatttggtcaactggatgctggtcaactggcctccattgcagccattgccgctggttttaccggcctgttgagcttgttcaacatcggtggtcggttcttctgggcctcgttctctgactacctggggcgtaaaaacacctacttcgtgttcttcgccctgggctttgccctgtatgcgctgatcccgaacctggggcatctgggcaacgtggcgctgtttgtggccgcgttctgcatcatcctgtcgatgtacggcggtggttttgccacggtcccggcttacttggccgacttgttcgggacccagatggtcggcgcgatccacggtcgcctgctgaccgcctgggctgcggcgggcgtactgggcccggtgctggtgaactacctgcgtgaataccagttgagcatcggcgttgaacgcgccgcggcctacgacatcaccttgtacatcctcgccggcctgctggtgctgggctttatctgcaacctgctggtgcgcccggtggccgacaagtacttcatgaccgatgccgaactggccgccgaacaggcgctgggccatgacaaaggtgctgatgcgagcaccgtgctggagtggaaggcctccgccgccagcaagccgctggcgattgccgcgtggctggtggtaggtattccgttggcgtggggtgtgtgggtgaccctgcagaagaccgcagtactgttccactgataccgtggctgatcgttggctgatcgttcccacgctcccgcgctgatcgttcccacgctcccgcgtgggaatgcatcccgtgacgctctgcgtcaccctctgcgcagggcttgggccctgcggtgtgatcggaacgcggagcgttcctggcggcattcccacgcggagcgtgggaatgatcgcgcgcaccatgctggggcgccgagattaactcgtcagtcttatccccttcgttgtttctgtttagcgcccgcgcccctataatggctgcctttttcgcccaatgattttgcggagctggtgatggccgaacgtaaggcatctgtcgagcgcgacactctggaaacccagatcaaagcctcgatcaacctggatggcaccggaaaggcccgatttgatatcggtgtcccttttcttgagcacatgctggaccagatcgcccgtcacgggctgatcgacctggatatcgtcggcaaaggcgacctgcacatcgacgaccaccacatggtggaagacgtgggcatcaccctcggccaggcgtttgccaaggccatcggcgacaaaaaaggcatccgtcgctacggccatgcctatgtcccgctggacgaagcgctgtcccgcgtggtcatcgacttctccggtcgcccgggtttgcagatgcacgtgccttacacccgcgcgaacgtgggccgtggctttgacgtcgacctgttccaggaattcttccaaggtttcgttaaccacgcactggtcagcctgcacatcgacaacctgcgcggcaccaacactcaccaccagatcgaaaccgtgttcaaggctttcggccgcgcactgcgcatggctgtggaagtcgatgagcgcatgggcgggcaaatgccgtcgaccaagggcgtcctgtaatgcagacggtcgcggttatcgattacggcatgggtaacctgcactcggtggccaaggcccttgagcatgtaggtgccggcaaggtgctgatcaccagcgatgccaacgtgattcgcgaagccgaccgcgtggtgttccccggtgttggcgcgattcgcgattgcatggccgagatccgccgcctgggttttgacagcctggtgcgcgaagtcagccaggaccgcccgttcctcggcatctgcgtgggcatgcaagccttgctcgacagcagtgaagagaacggcggagtcgactgcatcggcctgtttccgggccaggtgaagttcttcggcaaagacctgcatgaagagggcgagcacctcaaagtcccgcacatgggctggaacgaagtgcgccgcaccgtcgaccacccgctgtggcacgacatcccggacatggcgcgtttctacttcgtgcacagctactacatcgccgccggtaacccgcgccaggtggtgggtggcgggcattacggcgtcgactttgccgccgcgctggccgatggttcgcgctttgccgtgcagtttcacccggagaagagccatacccatggcctgcaattgctgcagaacttcgccgcgtgggatggtcgctggtaaatggccaggaaaccgaagccgccgatcttgaacctcgcgcccgagcaggagcgtgaggctactgacaagatcaagcgattcatggaggaccgcttcgagctcaagctgggctcgttcgaggtcgccgagattcttgagctgtttaccaccgaagtggcgccgcattattacaacagggcgattttcgacacgcagacgctccttaaagaaaggttcgaaagcatcgaaagcgacttgtggtcgcttgagaaaccctgatttcccaagcattgctgaatatcgaataaggtttgccagatgctgattatccccgctatcgatctcaaggacggcgcttgtgtacgcctgcgccaaggccgcatggaagattccaccgtgttctccgatgacccggtgagcgtggctgccaaatgggtagaagggggctgccgtcgtctgcatctggtggacctgaacggcgccttcgaaggccagccggtcaacggcgaggtggttactgccatcgccaagcgctacccgaacctgccgatccagatcggcggcggtatccgctccctggaaaccatcgagcactacgtcaaagcgggcgtgagctacgtgatcatcggcaccaaggccgtgaaagatccagccttcgtcgccgaagcctgccgcgctttcccgggcaaagtgatcgtaggcctggatgccaaagatggcttcgtcgctaccgacggctgggctgaaatcagcacagtgcaggtgatcgacctggccaagcagttcgaagccgacggcgtgtctgccattgtttataccgacatcgccaaagacggcatgatgcagggctgcaacgtacccttcaccgcagccctggcagcggccaccaagattccggtgatcgcttccggcggcattcataacctgggtgacatcaagtcgctactggacgccaaggctcccggcattatcggcgccatcaccggccgtgcgatctatgaaggcactctggacgtcgccgaagctcaggcttactgcgacgcctacaacggctgaggactgaccatggcgctggccaaacgcatcatcccttgcctggacgtcgacaacggtcgcgtggtcaagggcgtcaagttcgagaacatccgtgatgccggcgacccggtggaaatcgcccgtcgctacgatgagcaaggtgccgacgagattacctttctcgacatcactgccagcgtcgatggccgcgacaccacgctgcataccgtcgagcgcatggccagccaggtgtttatcccactgaccgtgggcggtggcgtgcgcaccgtgcaagacatccgcaacctgctcaatgccggtgcagacaaggtctcgatcaacaccgccgccgtattcaaccccgagtttgtcggcgaagccgcgcagcacttcggctcgcaatgcatcgtggtggctatcgacgccaagaaggtatccggcccgggcgaaaccccgcgctgggagatcttcacccacggcgggcgcaagcctaccgggctggacgcggtggagtgggcgatgaagatggaaggcctgggcgccggtgaaatcctgctgaccagcatggaccaggacggcatgaaaaacggcttcgacctgggcgttacccgcgccatcagcgatgccctgggcattccggtgatcgcatcgggtggcgtcggcaacctgcaacacctggccgatggtgtactggaaggccacgccagcgcggtgctggcggcgagtattttccactttggcgaatacaccgtgcccgaggccaaggcctatatggccgcacgcggtatcgtcgtgcgctaaacgctgctggacaccatggcaggctcgcggcactctctgcgcttgccatggattccggtagccttcatgttcaaacacctgctgctcgccctcgccagttcctccatgctcatggtggctacggcacacgccgaacaaccgtctgacgcctccctggtgttgctgacagaaaatttcccgccctacaacatggcgaaaaacggcaagaacttcgcaaaggacgagaacatcgaaggcatcgccgtagacatcatgcgcgaaaccttcaaacgtgccggcatttcctacaacctgaccctgcgtttcccttgggagcgaatctacaaactcgccctggaaaagccgggttacggcgtgtttgtgatggcgcggttgccagaccgtgaagccttgttcaaatgggtcggccccatcggcccggacgattgggtgctattggccaaggccgacagcaagatccaactggaaaaccttgagcaggcgcgccgctacaggatcggcgcctacaaaggcgacgccattgccgaaagcctggacaagcaggggctcaagccgattgttgccttgcgtgaccaggacaatgcgcaaaagctcatggagggccagatcgacctgtgggccactggcgatcctgcaggacgttacctggcgcggcaagtgggggtgaacgggctcaagacagtattgcgcttcaacagtgcgcagctttacctggcgttgaacaaggacgtgccggatgaggtggtggccaggctccaggctgcattggatgagttacgcaagagcggccgtatagacgaaatcatggcgcgttacctctgaagttggcaggatgaacacgatcaaaaatgtgggagcggggttgcccgcgatagcaatgcgtcagccaatatctgtgtgactgacactccgccatcgcgggcaagcccgctcccacagtggatctttgtaatcttcctttaacggtagatgccgttcttgccatgcccggccatcgcccggttactgcgcacgctgatcatcaatttgatatcgatccactccacgccttgcgccttgagcttgggcaattcgcgctccagcaccgccagggtctgcgggtaagggtgcccgatcatcaccgccgagccctgcttgtgcgccagtttgatcgcggtttgcaactgcgtggtaatcgccgcttcggtgcgttcgtcgtcgagaaatacatcccgcgacacatgggccaaaccgatcttctgcgcctcggcggcggcaacggtctgcgcgctggtgcggctgtcgacgaagaacttgtggcgccgttgcaactcacccatcagccaagccatcgccgccggttgtgcggtcatgcggctgcccatgtggttgttgatgccggcggtgtagggcactgcgtcgaacgcggcgtccaggcgcttgcccagttcttcgatcgacagctcagggtgccaggcgaatgggccggtggccgggtccatgggcatgtgcaggatcacgatcttgccagccttatgggcctcacgggcgaattcggcggcgtggggcgtgtccggcatgatggcggcggtcaccgggccgggtagcgcgagcacgcggcgatcccgaggcaggttttgccccaggtcgtcgatgatcagtgtcaggtaggctttgtgcggttcgccggcaggggccgcttgagcgacccctgccaggctgcacagcacagcgaggatcagggcaaggcgcatgatcaacggctgcgggtgatgctcaagcccttgagcaggctgagtgcctgggccagttggtagtcatcgtcctgcggcatcggcttggccttggcgcggctgccggttggctggtcggcaccgccgttgccattgcccaggtgaccttgcaggtcggcctctttgtagtattcgccgtcgatctcgttggtgatcttggcgcggcgtacttcgatgtccggcacgatgccctgggcctggatcgagcggccgttgggcgtgtagtacagcgccgtggtgatcttcagcgcacgctcgttgttcagcggcaatacggtctgcaccgagcctttgccgaagctggtggtgcccatcagcacgccgcgcttgaggtcttgcagggcaccggcgacgatttccgaagccgaggcgctgccaccgttgatcaataccgccagtggcacgttctcgctgaggtcgttgccggtggccgagaagcgcaactctgagttggcgatacggcccttggtgtagacgatcaggcccttggtgacgaagtggtcgaccacctcgaccgccgactgcaacacgccgcctgggttgttgcgcaggtcaagcacgatgccgttgagcttcttgccgttgtctttgcgcagcttggccagggccttggccacttcgtcgccggtcttgacctggaactgggtgatacggatataaccgtagcccgactccagcagctggcttttcacgctcttgaccgtgatggtcgcgcgggccagggtcacgtcaaacgggttgccgccgtcgcgtaccagggtcagggtgatcttctggccgagcttgccgcgcatcttgtcgacggcttcggtcatggtctggccgcgggttggctggccgttgatcttcacgatcaggtcgccggcctggataccggccttggacgccggggtgtcgtcgataggcgagaccactttgatctggccgtcttcggagcccacttcgatgccaaggccgccgaactcaccgctggtgctttcctgcaactcggcgaaatcttccgggcccaggtaggcggagtgcgggtcgaggttgctgagcatgcccttgatggcattttccagcagggccttgtcgtctacgggttcgacatacgctgccttgatccggtccatgacctcggcaaaggtacgcagctcgtccagcggcaatggcgccttggtcgtcgcagccgtggcgggtgcagccggtgcggcctggtcggcaaaagccagaggcgcgccgatcaccagggcgatcgtcagggccagcgaagtgaggcgggacaaatgcagcatgtcgaacgaactcctaatgtagatgcgaccctatccttgggaccggcaccattgtgcagggtcgctcgggcggccctgctgacgaatagcgaagtacagcgccggggtgtcctggccaccactgttaccgacagtggagatggattcaccggcttttacaacatcacctgccgacttgagtaatgtctgattgtggccgtaaaggctcaaatagccattaccgtggtcaagaatcaccagcaagccggcgccccgcaaccaatcggcaaacaccacgcggccaccatgcacggcgtggacctggctgccggcagaggcgctgatcatcacgccatcccacttggcgcgggtgtcatcgccacgagtttccccaaagcgtgccagtaatcgaccatcaaccggccatggaagtttgccgcgcgctgaagcaaaagggccgccgaacgactcgccactgctggaaaccagcgggccaggggctgcgcgcgcgggtttgcgcggggccggagcgtcggtggtggcagccagttcagcctcacgctgacgctttttttcggcttcctgctgggcgatcagcgctttttgccgcgcttcttcggcctcgcgtgcctggcgggccagggtttcttcgatggtcttgaggactttggccaggtcggcctggtcctgctcgcgggcctggagtttggcgtcgcgggcttttacgtcgctgttgagcttggccagggcctgctggcgttccttgcgtactttatcgagctggtcgcgctgggtgtccagggcggttttctggtcgagcagctgggattgctggtcggcgatttcctgttcgacattggccaattggcgcagggtttcgttaaaccccttcaattgcgccaggcgcgcctggctcaggtaatcgtaataggtgagggtacgggcgaatttttccggattctgctggttgagcagcagcttgaggtactcctggcggccgctctggtacgcggcacgggcctggatcgcgatcaggcgttgctgttcaacgcgcgcgctctggagtttttttttctcagcgtcgagtcgctccagttccgactcgctcttctttagttctttttgcagctcctggacctgcttctccagcttgcccatttcggtttccgtgccgcgcaggtctttctgcaccccggatttttcttcctggagcttgccgagcagctttttcagctcggtaatgtcctgacgcgtagcgtccaactgttgttgggtttgtgcgcgctcatcggcaaacgccggttggagcaggcagacaagagcaagggttatcaaggcgcgaagcatagaggcgggcgacaccaggggaaaaggacggcctagtatgcccgccaagcgctgcaaaaaaaacgcccaattggggctggtgggcaagataggtgccgagtggtgctggtatggcaaaaagatatctctcaaagcgccacaaaccaatgtgggagcgggcttgcccgcgattgcggtgggtcagcgacatagatgtcgactgattagccgctatcgcgggcaagcccgctcccacactgttttgtggcgtactttggatcagaccaggatcgaggtgccggtcatctccttcggctgctccagccccatcagtttcagcatggtcggcgccacatccgccagcacgccaccttcacgcactttgaaatcacgtttgccaacatagatgaacggtaccggctcggtggtgtgcgcggtgtgcgcctggccggtggattcgtcggacatctgctcgcagttgccgtggtcggcggtgatcagcgcttcgccgccgactttatccagcgcgtcgacaatgcggccaacgcacaagtccaggcattcaactgccttgaccgccgcttccaggttgccgctgtggccaaccatgtcgccgttggcgtagttgaccacgatcacgtcataacgctggttatcaatggcatcgacgatcttgtcggtgacttccggcgcgctcatttccggctgcaggtcataggtggcgacttttggtgacgggatcagaatgcgctcttcgccggggaacggctcttcgcggccaccggagaagaagaacgtcacgtgggcgtatttctcggtttcggcgatgcgcagctgggtcttgccgttcttggccaggtagtcgcccagcacgttctccaggctgcccggcgcgaacgccgaaggggccgggatgttggcggcgtattgggtgagcatgacgaactcgaccttcggctggcgcgcgcgttcgaagtccttgaagccttcatcgacaaacacatggctcagctcacgggcacggtcggcgcggaagttcatgaacaccacggcgtcgccgtcttcgaccttcaccggctcgccgatggtggtggccttgacgaactcatcgctctcgccacgggcgtaggctgcttccagaccttcctgggcggtggctgcgttgaattcggcctggccgtcgacgatcaggttgtaggcttgagagactcggtcccaacggttgtcgcggtccatggcgaagtagcggcccaccaggctggcgatacggcccttgcccagagcggcgaaggtggcgtccagcagttcgatagaggattgcgcgcttttgggcggcgtgtcgcggccgtcgaggaaggcgtgcaggtagattttgtcagcgccgcgcttgaacgccagttcggccatagcgaccaggtgatcctggtggctgtgtacaccgccgtccgacaacaggcccatgaagtgtacggccttgccggcggcaacggctttatcaaccgccgcgcagatggtcgggttctcgaagaactcgccatcgcggatcgctttggtgactcgggtgaagtcctggtacaccactcgtccggcgccgaggttcatgtggccgacttccgagttgcccatctggccgtccggcaagcccacgtccatgccggaacctgagatcaggccgttaggcacggtggcggtcagacggtccagtactggcttgttggccgagtaaaccgcgttgtcgtggtggctttcactgtgtccgaagccatcgagaattatcaggaccaaaggtttaggcgtggtagtcatagatcctctcgcggcgttaataaaggaagacaattgaaaagggagtggcagtttaaagcgaagttccaaccacgtcaccgctttacgggggttggccccccctggcggctgtgtatacttaccgccattttaacgccctggaacctccttgatggttgatcacctgattgcatttgccactgcccactacctgcttgtgggcgccttcgtcatcctgctggcgctgctgatcgctcatgaactgagccgcggtggtcgcagcctgagcacgtcggagctgaccgcgctggtcaacaaggatgaggccgtcgtcgtcgatattcgcccggccaaggattatgccgccggccatatcgttggcgccctgaacattcctcaggacaagctgatcgcgcgcttggccgagctggaaaaatacaaggccaagaccattatcctggtcgacgcccaaggccagcactcgggcacccacgcccgcgagatgctcaagaccggcttcaccgctgccaagctgtcgggtggtatcagcagctggcgtggcgataacctgccgttggtgaagtgatatgagccaggttgtcgtgtattccagcgattggtgcccttactgcatgcgggccaaggccttgcttgagaaaaagggcgttgccttcgaagagatcaaggtcgatggcaagccccaggtgcgcgccgaaatggcccagaaagccggccgcacgtcggtcccgcagatctggatcggcacccggcacatcggtggttgcgacgacctgtttgccctggagcgcgccggtaaacttgatgcgctgctgtccgtctgactcctaaacccttaagaaccccaagataaagaaggatctgcgatgactgatcaacagaacaccgaagcagcgcaagaccaaggcccacagttctcgctgcagcggatctacgtgcgtgacctgtcgttcgaagcgccaaaaagcccggccatcttccgtcaggagtggaccccaagcgttgcgctggacctgaacactcgtcagaaatccctggaaggtgacttccacgaagtggtgctgaccctgtcggtcaccgtcaagaatggtgaagaagtcgctttcatcgctgaagtgcaacaggccggtatcttcctgatccagggcctggacgaagcgtccatgagccacaccctgggcgcgttctgcccgaacatcctgttcccgtatgcccgtgagaccctggacagcctggtcacccgtggctcgttcccggcactgatgctggcgccggtgaacttcgatgccctgtacgcccaagagctgcagcgcatgcaacaggaaggcgcgccaacggttcagtaagccttcgatgtataaaaaagcgccatcacaggcgctttttttatgtactgctcacgcctgtaggagcgagcttgctcgcgaagagcgtcaacgatgacgcagcgctatcaggtagcccacattgcctgttggtttttcgcgagcaagctcgctcctacagggagaatgggggttacttgaagcccagttggcgccagccttcatagacggcgacggccacggtgttggacaggttcaggctgcggcagccttcacgcatcggcaagcgcaggcgatggccatcgggcaacgcgtcaagcacctcggccggcaggcctcggctctccgggccgaacagaaacgcgtcgccctcggcaaagctggcatcatgaaacggccgcgagcccttggtggtgaacgcgaacagccgtgggtggcccaggctctccaggcaactggcgaggtcggcatggcgcttgagggtggcgtactcgtggtagtccagcccggcacggcgcaggcgcttgtcgtccatgtcaaagcctaaaggctcgatcaaatgcaggtggcagccactgttggcgcacagcctgataacgttgccggtattcggcggaatttctggttgaaaaaggatgacgtgaaacatgcacggctccgaaggcaaagatgcgctgcattctacccccgaagacgacccgagaccgaagctattgccgagggtgttggggtcattggcgattgtcggcttgatgattggcttgatgatcggccgcttgaccacccccgaaccgcttgaactgcaacaggtagaacctgcggcggatggcttggtggtgtggttcaacaacgaacccaagctgcacggcgagcatatcgacggcaccgtggcgctgctgtttgacgcccagggcaaggctgccagcgggcagctcaaggtcaatgccaaggacgtgaattggcgcatacgcaagaccgatgctggcttgctgctgaacctggtagcggcccggccgttgcgtggggagtggagcggtgcagaggttgatggccgctggcggctggagatccatctccaagagcaataaaagagggagttcccggcctgcctgtaccagggctcccaaaacggggtgaagcctgaggcttcggtgttaaagaggggattctcggcctgcctgtaccaaggtccccgaaactgggtagtacaagggttattgcagggggcgtgccaaaacttgcgtttgcggcttgaaaaaaatgccaaaaagcgcaaagccccggaatacggggctttggttgtttctacggttatgaacttcgcagcgaaagcgctctgtgaggtttcgggtctgtgctcaatggcggttcatcgtgcattgaagcggtgcacagtctgctggcattgcacaaaacaaatgtgggagctggcttgcctgcgatagcggtgtgtcagccctatatcgggtgacgggcacaccgccatcgcgggcaagcccggctcccacactgggctttcagcggtcttggggttcaggcctcatcaccctcatcatcatccccaccatccaccttcatccccaattccttgatcttgcgcgtcagggtattacgcccccagcccagcagcacggcggcatcgcggcggcggccggcagtgtgtttcaacgcagtctcgatcatgatccgctcgaacgccggcacggcgctgtccagcaggttcgactggccgcgtgccaaggcctggtcggcccattggcgcagcgcctgttcccagttggtcacgggtgccgagtcctgcggcaggctcagcagctccggcggcaggtcgctgatgtgtacttctcgcccggaggccatcacggtgatccagcggcaggtgttctccagctggcgaacgttgccgggccacggcaggttcttgaggtattcctcggtctcgcttttgagcagcttgggttccacagccagctccagggcggcgcggctgaggaagtggcgggcgagggtggggatgtcttcgcgacggtccgacatgcgcgggatgtggatgcggatcacgttgaggcggtggaacaagtcctcacggaatttacccgcatgcaccagggtttccaggttctggtgggtggccgcgatgatgcgcacatccaccttgaccggcgtatgcccgcccacacggtagaactcaccgtcagccagcacgcgcagcaagcgagtctgggtatcggccggcatgtcgccgatctcatcgaggaacagcgtgccgccgtccgcctgttcaaagcgtccgcgacgcaggttagccgcgccggtgaatgcgcctttttcatggccgaacagctcggactccatcaaatccttgggaatcgccgccatgttcagtgcgataaacggcgaggccgcccgtgggctgtggcggtgcagcgcatgggccaccagctctttaccggtccccgattcgccgttgatcagtacggtgatgttggaatggctcaagcgcccgatggcgcgaaacacttcctgcatcgccggtgcttccccgatgatttccggggtgcgggtcagggttggcggggcttcctggttctgttgttcctgggcgtgctggttggcgcgcttgaccagcgccaccgcctcatccacgtcgaatggcttgggcaggtattcaaaggcgccgccctgataagacgcgacagcgctgtccaggtccgagtgggcggtcatgatgatcaccggcaagcgcggatgctgctcgcgaatgcgcgccagcaagtccaggccactggccccaggcatgcgaatatcggaaatgatcacatccggctgctggcgtgccaggcggctcatcaccccatcggcgctgtcgaagctctgggtggtcatgccttcttgttgcaaggctttttcgaggacccagcggatagaacggtcgtcgtcgacgatccagacagtttcactacggctcatgtcgtgggggctccttgttccaatggcaggaagatcgagaacgtggtgtggccggggtggctctcacattcgatcaggccctggtgctggctgatgatgttctgggtaatggccaggcccagcccggtaccgtccgggcggccgctgaccatgggaaagaagatggtttcctgcagctctgcaggaatgccggggccgttgtcgatgatctcgaccttggtcaccaggcgatggcgcacatggccaatggtgaactggcgcagggcgcgggtgcgcaggctgatgcggcccaggcgcagctcgttctggctgctgatggcctgcatggcgttgcgcacgatgttgagcaccgcctggatcatctgttcgcggtcgatcaacacgtcgggaatgcttgggtcgtagtcgcgcaccaaggtgatgcagccttggctttcggcctcgaccagttggcagacgcgctcaagcacttcatgcacgttggtcatcgccagggacggcagcttgttggagcccagcatgcggtccaccaggttacgcaggcggtcggcttcttcgatgatgacgttggtgtagtccttgaggtgctcgtctggcagctcgcgggacaacaactgtgccgcgccgcgaataccgcccagcgggttcttgatctcatgggcgaggccgcgcaccagcatcttgctggtttcctgcttggacagctgcgcttcctccttggtgatgcgcagcaggcggtcgcgggggtggacttcgagcagcagcagggtcgcgccattgctcaggatcggggtcaccgcgtagtcgacggtcaacgtctgcccagtgagtgcggtgagcatcgcttcgcgcttggtaaacggatgagcctgctccacggcctggcgcaacgagctcaaggcttcggccgactcggtgaacaattcgctgatgaactgcccatggctgcgctggccgctgatggccaggagcatctccgccgccgggttcatgtactcaagacgcaggtcggcattgagcaggatggtcgcggtggtcaggttgtcgagtaacaaacggtgcagtgcatcgctgatggtcatcgggacctcttttggagcaaggcgcgggcttgaggcacacgctgatacaaggaaaatgcaaaaaccaaaccaaggctccgaaaagaagcgctaaccccctgaaataaggggtttaggcgcgaaactgtggcgttctgccagcttgaacgggaagtttcgaaccaaaatgggctgggcacttgagaagggtgcaggctatcgcaccaatatagtgcggttttgtgaaggttgttcagcaactgaagcttgaaggcaaatcgcagtcagtgtgggagctggcttgcttgcgatagctgtggtgcattcaacaccgttatcgcagtcaagccagctcccacatttttaattggatttgcagtccttttaacctttatagatgcaaagctcggcggtggcgcggatcatcgccagttggcgcagcggatcattcagcggttcgtgcacggcctcggccagccattgcgggcactgcgggtcggtgcgctgtggagtgaagtcggccaactgctgcaacagccttttttgcagctcgtccaatcgcgggcggatctgctggaccaggtccgggcgtggatcgtcgggggctttgccttggaactgccagtcggacaggtgggtgtattgcaccagtttattggcttcgatctgcgcggcgaaaaactgctcagcagcggccgggtccagcttgtaaccagatgcctgggccgtaacgctggcgatcacctcttgttcgcgcttcttgtcctccacgggcttgtggctgtcccatttgctcagcgccacctggtcggcaatctccaggcgttcggcgatgctgttgagcaagggttcgagcgtaggcggcgcagcgctcgcactggcactgatgaacagcagggcaaatacaagtcgatatctcaaaggtgatctcctgtgggagcgggcttgcccgcgatggcggtgtgtcagtgatacagcaggtggccggcagtgcgccatcgcaggcaagccagctcccacacgttgattgggtttgcagagctggcgtagcgtaacgcccaggcaaaaaaaagacctcccgaaggaggcctttttcatcacgctaccttaagcagcgctaccggatcagcagctgtagtacagctcgtattccagtgggtgtacgaaggtacgtactttgatttcttcttcgcttttcagggcgatgtaagcgtcgatgaagtcgtcgctgaaaacgccgcctttggtcaggaacgcacggcccttgtccagctcttccagggcttctttcaggctgccgcacacttgtgggatctctttggcctcttcaggcggcaggtcgtacaagtttttgtcggcggcgtcgccagggtggatcttgttctggataccgtccaggccggccatcatcagggcggcgaaggccaggtaagggttggcagccgggtctgggaagcgcgcttcgatacgacggcctttagggctgttgacgtaaggaatacggatcgaggcggagcggttgcgtgccgagtaggccagcatcaccggcgcttcaaaacctgggaccagacgcttgtaggagttggtcgacgggttggtgaagccgttcagcgctttgccgtgcttgatgatgccgccgatgaagtacagggcggtatcggacaggccggcatagccttcgccagcgaaggtgttcttgccgtctttggaaatcgatacgtgaacgtgcatgcccgagccgttatcgccgtacagcggcttaggcatgaaggtagcggtgcggccataggcatcggcaacgttgtgcacgcagtatttcagggtttgaacttcgtcagccttcttcaccagcgtgttgaatttcacgccgatttcgttctggccggcagtcgccacttcgtggtggtgaacttcaacggtctggcccatttcttccagtgcgttgcacatggaggtacggatttcgtggtcgaagtcgaacggtggtactgggaagtagccgcctttcacgcctggacggtggcctttgttaccgccttccacgtcctggtcggacatccacgagccttgctcggagaaaatcttgaacatggagccggagatgtcggatttgaacttcaccgagtcgaagatgaagaactctggctcagggccgaagaatgcggtgtcgccgataccggtggacttcaggtattcctcggcacggtgggcgatggcgcgtgggtcgcggtcatagccttgcatggtcgaaggctcgatgatgtcgcacaccaggatcagggttggctcttcggtgaacgggtcgagtacggcggtgctgtcgtctggcagcaggatcatgtcggaggcttcgatgcctttccagccggcgatggaggaaccgtcgaacatcttgccgacttcgaagaagtcatcttccagcgcatcgcgagccggcatggtcacgtggtgctgagtgccttttgtgtccgtgaagcgcagatcaatccatttaacgtcatgatctttgatgagttgaaccgacttcgacatggtgtcctccgggtggcttcgggcttggggtagtggagttagcccttagaatttgggtgatgccggcgcggatactccgccaaggcaacctgcctcacaagagagcaaattgcatgccagtgcgccaacatggccgttttgcctcaaaatggcccctataacggtgcaatcggcaaaaacggcataaatcgcgcactgcaatgtagcgtttatttgggtaaatgacccgttttggtgcattgcatgtgcaatgcatattaactggttaaaccttgagcgatttccgctataatccgcgcccccctttttcagcaggcccggcgcgcgctgtttccatgaaattaatcgttaaagtcttccccgagatcaccatcaaaagccgaccggtacggacgcgtttcatccgtcagttggccaagaacatccgtgccgtgctccgtgacctggacccggctgtggtggtgaacggcgtgtgggacaacctcgagctggaaacccgcattaccgacgccaaagccttgaaggacatgaccgagcgcctgagctgcatgccgggcatcgcgcatttcctgcaggtggatgagtacccgctgggcgacttcgacgacatcaccgaaaagtgcaagcagcactacggcagtgcgcttgaaggcaagattttttcggtgcgttgcaagcgtgccggcaagcacccgttcagctccatggacgtcgagaaatacgttggcagcaagctgcgtcgtgagtgcggcgccgctggaatttccctcaaagcgccgcaaattgaagtgcgcatggaaattcgcgaccaacggttgtttgtgatccacagccagcacaacagcatcggcggctacccgctgggtgccctggaacagaccctggtattgatgtccggcggtttcgattccacggtggcggcctaccagatcatgcgccgcggcctgatgagccatttctgcttctttaacctgggcgggcgtgcacatgaattgggcgtgatggaagtcgcgcactttatctggaagaaatacggcagctcccaacgcgtgctatttgtaagcgtaccgttcgaggaagtgctgggcgaaattctcggcaaagtcgataacagtcatatgggcgtagtattgaagcgtatgatgttgcgcgctgcgtcccgaatcgccgatcaattgcagatcgacgccctggtgaccggcgaagcgatttctcaggtctccagccagacgctgccgaacctgtcgatcattgactgcgtgaccgagaagctggtgctacgcccgctgatcgccagccacaagcaggacatcatcgacctggcagagcaaatcggcaccgccgactttgccaagcatatgcctgagtactgcggggtcatttcggtgaaccccaagacccacgccaagcgtcaccgcgtggagcatgaagaaaaagaattcgacatggcgattctggagcgtgcgctcgagaacgccaagctggtgccaatcgatcgagtgatcgacgaattgggccaggatgtgcagatcgaagaagtcagcgaagccctggccggccagatcgtcatcgacatccgtcacccggatgccgccgaagatgagccgctggaaatcgctggcatcgacgtgcaagcgctgccgttctacgcactgaacgcgcgtttcaaggaactggataacagccgtcagtacctgttgtattgcgacaaaggcgtgatgagtcgcctgcatgcccaccatttgctcagtgaggggcatgccaatgtgcgcgtttatcgaccgagctaagagcccggggctgtttgcctgtggcctgcgtcaccggccccccgactctgccgtcaagctgtaacggcaaggcctgactctactgttaatcgctgccacgacctgtcagcacaccgaatcctctgatcgagatacacaagtgatcgaaaatctacgtaacatcgccatcattgctcacgttgaccatggtaaaaccaccctggtagacaaactcctgcgtcaatccggcaccctggagcgcaacgagctcaacgacgagcgcgtgatggactccaacgaccaggaaaaagagcgcggtattaccatcctggctaaaaacaccgctatcaactggaacggctaccacatcaacatcgtggataccccgggccacgccgacttcggcggcgaagtagaacgcgtaatgtcgatggttgactccgttctgctgctggttgacgctcaagacggccctatgccgcaaacccgtttcgtgaccaagaaggctttcgaagccggcctgcgtccgatcgtgtgcatcaacaaggttgaccgtccaggcgcgcgtccggactgggttctggaccagatcttcgacctgttcgacaacctgggtgctaccgaagaacagctggacttccaagtcatctacgcctccgccctgaacggtattgctggtcttgaccacaccgacatggctgaagacatgactccgctgtaccagtcgatcgtcgacaacgtaccagcaccgaaagtcgaccgtgaaggcccgttccagatgcaaatctcggcactggactacaacagcttcctgggtgttatcggcgttggccgtatcgctcgtggtagcgtcaagccgaacaccccggttgtcgctatcggcgctgacggcaagaagcgtaacggtcgtatcctgaagctgatgggtcaccacggtctgcaccgtgtagacgttgaagaagctttcgctggcgacatcgtatgcgtgagcggtatggactcgctgttcatctccgacaccctgtgccagccggacaacgtcgaggcgatgaagcctctgaccgttgacgagccaaccgtttccatgaccttccaggtaaacgactcgcctttctgcggtaaagaaggcaagttcgtgacctcccgtaacatcaaggaacgtctggacaaggagctgctgtacaacgttgctctgcgcgttgaagaaggcgactcggctgacaagttcaaggtttccggccgtggtgagctgcacctctcggtactgatcgaaaccatgcgtcgcgaaggcttcgaaatgggtgttggtcgtcctgaagtgatcatccgtcaggttgacggcgtgaagcaggaaccgttcgaaaacgtcaccatcgacacccctgaagaatcccagggcaaggtcatggaagagatgggcctgcgtaagggcgacctgaccaacatggtgccggatggcaaaggccgtgtacgtctggaatacaacatccctgctcgtggtctgatcggtttccgtaaccagttcctgaccctgaccaacggtgctggcatcctgacctcgatcttcgatcgctacgacaccatgaagtccggcgacatgtccggccgtcagaacggtgttctggtatcggtagaaaccggcaaggcgctgacctactccctggaaactctccaggcgcgtggcaagctgttcgttgaacacggtcaagagatctacaacggccagatcgttggtctgaacagccgtgacaacgacatgggcgtcaacccaaccaaaggcaagaagctcgacaacatgcgtgcttcgggcaaagacgaaaccatcgctctggttccacctgttcgcttcaccctggaacaggccctggaattcatccaggacgacgagctgtgcgaagtcacgcctaagtcgatccgcctgcgtaagaagatcctggacgaaggcgagcgtacccgcgctgccaagaaagccaagaactgagttaactcaggctgaatgaaaaacgcccccggtcgaaaggccgggggcgtttttttatgcctgcagtctgtgtgttgtgatcgttcccacgctccgcgtgggaacgccgcgtgggacgctccgcgtcctgctttcaagagcggacgcagagcgtccacagctgcattcccacgcagagcgtgggaacgatcaaaaacttagaacttgtcgagggtcttgaagttggtctcgcgcaccacttccttgggcttgtacgcgcaataccctggccgcggcccgattttcgggtgattgcggcaggtatccgggcgcttgtcataaatagtgcaaaagcgcgtcttacgatccaggtacaggcagtcgttgttgctcatgcgctgcaaggtgaaaatttcggacttgttgttgtagcgctcgacgatgccttctttctgcaaacgcttggcgatgttcttcggcggatcgccgcgctcgaactcatcgacgatgccaatgcggatcaggtccttgatcttcacctccaccggcagcgtgcagcagctggacacgcagccgccgcacatatgggcggagtatttctgccaggtctctagacggtcgagttccgcggcggcgatcagttgaggcttcatcaaggttccaaggtggggcgttatccgggcgcgcgatcataccgggattggtggttttttgaacaatattttgcaggtttcagctcaaaggtttggccagggcctgatcgggcacgacccctgcatcaaattcagccacaggccaatgagttaaaaaactgccgaaccagcacgtctaccgtctgtcagaccgactaggctctagcaactccttcaatctcgcccgaggtcgcaccgatgtctcaggaaccgcttgcacgagaagcagaggtagccgcattccgcgatgctgtcttgaccaaactcacctacgcggtgggcaaggacccggatcacgccttcgaccatgactggttcgaagccattgccctggccgcgcgcgaccagatggtcgaccactggatggaccacacgcggcgtatttatcgcaaaggccagaagcgcgtttattacctgtccctggaatttctcatcggccgtctgctctatgacagcctgagcaacctgggtgtgctggagatcgcgcgcgaagcgctgtcggaactgggcgtcgacctggagcgcatccgcctgctggagcccgacgcggcgctcggcaatggtggcctgggccgtctggcggcgtgctttatggaaagcatgtcgaccctcggcattgctggccacggctatggcatccgttatgaacacggcttgttccgccaagcgattgtcgacggttggcagcaggaacagaccgagcgctggctggatttcggtaacccttgggaattcgaacgcgccgaggtgatttacccgattggctttggcggcagtgtcgaaaccgtggcggacgcctccggcaagatgatccaggtatggtcgcccaacgaaaccgtgcgcgccgtggcctatgacacgccggtcgtcggttggcgcggcgccagcgtcaacaccctgcgcctttggcgtgcgcgcgccgtagaagacctgcacctggagcgcttcaacgccggtgaccatttgggcgctgtcgccgaagtggcccgtgccgaaagcatctcccgcgtgctttacccggccgacagcaccgaagcagggcaggaactgcgcctgcgccaggaatatttcttcgtttccgcgtccctgcaggacttgttgcgtcgccacaaaaacatgcacggttcggtactgagcctgggcgagcacgccgccatccaactcaacgacacccacccgtccatcgccgtggccgagttgatgcgccagctggtcgacctgcatgacattccctgggaagccgcgtgggatgtcaccgtcgagaccctttcgtataccaaccacaccctgctgcccgaagcgctggaaacctggccggtaggtttgatggagcgcatgctgccgcggcacatgcagatcatctacctgatcaacgcccagcacattgactcgctgcgtgccaaaggcatccacgactttgatgttttgcgcgctgtgtcgctgatcgaagaagacaacggccgccgcgtgcgcatgggcaacctggcgttcctgggttcccatagcgtcaacggcgtgtccggtttgcatacccagctaatgcgcagcacggtgttctccgaactgcacaagctctaccccgaacgcatcaacaacaaaaccaacggcattaccttccgccgctggctgtaccaggccaaccccaagctgaccgatatgctagtggaagccttgggcccgggcattctcgatcagcccgaacagcgcctgatcgagttggaaccctttgccgagaaaccggcctttcgcaaagcatttgctgagcagcgcctgcacagcaagcgcgccctggcgcagatcatccatgagcgcctgggcatcgcgatcaacccggcggcgatgttcgacgtgcaggtcaagcgtattcacgaatacaagcgccaactgctcaacctgctgcacaccgtagcgctgtaccaggcgatccgtgccgagccgggcatcgactgggtgcctcgggtcaagatctttgccggcaaggcggcggccagctaccaccaagccaagctgatcatcaagctgaccaacgacatcgcccgcacggtcaacaacgacccgaccgtgcgcggtctgctcaaggtggtgttcctgcccaactacaacgtcagcctggcggaaagcatcattccggcagcggatttgtcggagcagatttccaccgccggcttcgaagcttccggcaccagcaacatgaagttcggcctcaacggtgcgctgaccatcggcaccatggacggcgccaatgtggagatgcacgagcgtgtcggcgccgagcacatgtttatctttggcctcagtgcccagcaggtggaagctcgcaaacacgccggcgagttcagcgccgggccggacatcgccgcgtcccatcgtttgaacgacgtgctgcaagccatccgtggcggggtgttctcgccggatgacccggggcgttatgtgggcctgatcgatgggctggtcgactacgaccgcttcctggtgtgtgccgactttgacgcctactgggacgcccaggcacgggtcgaggcgcattggcacgactccaaggcctggtggcgctcggcggtgctcaacacggcgcgcatgggctggttcagctctgaccggaccatcagggagtacgccaccgagatctggaaagccctcgactgacccctgatgccactgtaggagcgagcttgctcgcgaagaacctcaacgataacgcttgcttcctgaatgagcgcggcgcgtatgagtttttcgcgagcaagctcgctcctacagaggtgtcgttgctccgttgcgtgaactctattggcgttaaatcctctgattagaggaaatcagccccgactcgcgctaaactgcgcgggtttttagccccccattctccggagccgtccatgtcccgcgttaccttgagtcgctatttgatcgagcagacccgcagcaacaacacgcctgccgatctgcgcttccttatcgaagtggtggcgcgtgcttgcaaggaaatcagccacgccgtttccaaaggcgcactgggcggtgtcctgggcagcatgggcactgaaaacgtgcagggcgaagtgcagaagaaactggacgtgctgtccaatgaaatcctgctcgaagccaacgaatggggcggtcacctggccggcatggcgtccgaagaaatggacaatgcctaccagatcccaggcaaatacccgaagggcgcatacctcttggtattcgacccactggacggttcgtccaacatcgatatcaacgcaccggtcggcaccatcttctcggtattgcgttgcccgaacgaatacctgagccagaacgaagccctgaacgaaaaggccttcctgcagccaggcactgagcaggttgctgccggctacgcgatctacggcccacagaccatgctggtgctgactctgggcgatggcgtcaaaggcttcacgctggaccgtgaaatgggcagcttcgtactcacccacgaagacatttcgattcctgcttctacccaggaatttgccatcaacatgtccaatcagcgccactgggaagaaccggtgaagcgctacgtcaacgagctgatggaaggcgaagaaggcccgttgaagaagaacttcaacatgcgctgggtggccgcgatggttgccgacgtacaccgcatcctgacccgtggtggcttgttcatgtacccacgcgacagccgcgagccgtccaagccgggcaagctgcgtctgatgtacgaagccaacccgatgtcgttcctggttgagcaggcaggcggtgcgtccaccgacggccaccagcgcatcctcgacatccagccagaaggcctgcaccagcgtgtggcggtgttcctgggttcgaaggaagaagttgagcgtgtaacggcttatcacaagaagtaaaatcttgcggtaacaaaaaagccccgaaatgcgcttagcgcttcggggcttttgtttttattgaataaggtttttcagcagcaacgcctgcaggcttttccgagtgtcggcgatgatgtggacgtaaatgatcgggtctcgaatttcgtagatgatccgattcatgccacagacaacctgtcgatattggctgagattcaacttctcgatctcttgcggtatcgagccagcatagggttgagactcaagcagccgtatggcctgtttcatcgcgtcgtaggactgctgccaagtcgatgtcgagaactgccggatgaggtatgacttgatgtctttaaggtcgcgttttgccgagtgaagaatcacaaccttgaatgtcattgagcgtcgtccttgtccagctcggcgaacacgtcctccatgtcttgaaactgccccaactcaatctgccggttgcccaaggccaatagctttaacaaggccatggtttctgcctgttcctcaaaactcttcacatccatcaccaccagcttcgcttcgccattttgggtgatgaccaggggttcgcggctttcagtgagtgttttgacgatctcggcggtatgacttttcaagtagctgatcggctttatctgcgaagaaaatttcatggtttggccctggttcgagatgggactgattttagtcttaatttggtctttggcagacagcaactgatgaaaggccgtgattttccattcgaaaacacggttccagggggcagttcacataaaaaataaatagcaccccccatcgggaaccagacaccccttttcccttctaagcttctggcagataccccagctgctttgtctctccaggagcttttccatgtctatacgccgtctcgccctgctggctttttgcgtgctcttagccgcttgcagcaaggtcacccaagaaaactaccaaaagctctcagccggcatggccaaggccgaggtggagtcgttgctgggcaagccaaccgattgttccggcgcactgggcatgtccagctgcacctggggcgataaaaacagctttatcagcgtgcagtacgccggtgacaaagttctgatgttttccgggcaaggcctgaagtaaaccggggcgcgagcctgcgggagaagaagaatgatgcgttttgttttgttcctttgcgccagcctgtttttggcgggctgtgccagccattctggcgatgatctgcaacccaagacggcgagcaacgtcaacctcaagcgttaccagggcacctggtatgagttggcccggttgccgatgtacttccagcgcaactgtgcgcaatccgaagcccgctataccttgctgcctgatggtgacatgtcggtgttcaaccgctgcctgacacctgaatggaagtggcaagaggccaaaggcacggcgacgccgcaggtgccaggcaagaccgacaagctgtgggtggaattcaataactggtttacgtcactgttgccgggcgttgccaagggcgactactgggtgctgtatgtcagcgatgactacaagaccgccatcgtcggcagcccgagccgtcgctatatgtggatcctgtcgcgcacgccaacggtgagtgccgaaacccgcgaagacctgctgagcagggcgcgacagcaagggtacgacaccacgcggctgatctggcgtacatcggacaagcagatggcaaagtcctctcagtaatcctgagtaccctcaatccaatgtgggagctggcttgccttcgatacaggcacctcggtgcatcagttgcaccgggttgatgctatcgcaggcaagccagctcccatagttgttatggattggctgttagttcagcaagtccttcaggacctgggtgaatgcccggcggctgtcttcttcgccagcatgacgtccatctcgcaccacccacttgccattgaccagtacatcgcgcacttgccgatccccaccggcaaatagccagcggttgagaatcccatcctcactggccgtcgccaagtacggatcgctaccgtccagcacaatccaatccgcacgcttgcccacttgcagttgaccaatcggctggcccagcgcttgagcaccaccgtccagcgcagcatcgaacagcgtgcgacccaccatcggttgatcactgcggtacagccgattacgccgctgatcacgcaggcgctggccgtattccagccaacgcaattcttccaccacgctcagtgatacatggctgtcggagccgatgcccatgcggccgccctgggcgaggaagtctaccgccggaaaaatcccatcgcccaggttggcttcggtggtcaggcacaaaccggcaatcgctcggctgttggccatgcgggtgacttcatcggcatcggcatgggtggcatgcaccaggcaccagcgctcatccacctcgacattgtcatacagccactgcaacgggcgcttgccgctccaggccaggcagtcgtcgacttccttttgctgttcagcgatgtggatatgcaccgggcaggccttgtcactggcggccagcacggtatggatttgttcgggggtgacggcgcgcagggaatggaagcacaggcccagttgctgcgctggttgtgccgccagaatgggctgcaagcgggcttgcaggtccaggtagttttcagtgctgttgataaatcgtcgctggccttcattcggcgcttggccaccaaagcctgcgtgggtgtagagcaccggcagcaaggtcaggccgatcccgctgctggcggcagcgtggctgatctggcgggacagctccgtacggtcggcgtagggctggccgctgagatcgtgatgcacataatgaaactcggccaccgaggtgtagccggccttgagcatttcgatatacagctgacgggcgatgacctgtaactgctcggggttgatcttgccgaccatgcggtacatcaaatcgcgccaggtccagaaactgtcattggggttgccggccacttcggccaagcctgccatggcgcgctggaaggcatgggagtgcaggttcggcatgcccgccaacaccgggcccctgagccgttcggcgccttctgcactggcattgggctcaacctttgtcagcaggccatcggcgctgacttcaagacgtacatcgttggcccatccattaggcagcagtgcgcgttcggcaaagaaagcggacatgatcaaggcaccccggtcgtgtgtttatttgtatatacatatacagacgtttgcctgctcggtaaactccggcaatctatgcatctttttcccccgcaaggattccctgtgccgactccgcccgccaactcttcgctggctgcccacatggacgaaagtccggcgcccttgtatgcccgcgtcaaacagatgatcagccagcagatcctcaacggcaactggccgccccattaccgcgtgccgtcggaaagcgagttggtcagccagttgggcttcagccgcatgaccatcaaccgtgccctgcgcgagctgaccgccgaaggtttgctggtgcgcatgcaaggcgtcggtacgttcgtggctgagcccaaaagccagtcggccctgtttgaagtgcacaacatcgccgatgaaatcgcctcccgcgggcatcggcacacttgccaagtgatcaccctgggcgaagaggccgccggttccgagcgcgccgttgccttggaaatgcgtgaaggcgggcgcgtgttccactcgttgatcgtgcattacgagaacgacattcctgtgcaaatagaagaccgattcgtcaacgccctggtcgcgccgcaatacctgcaacaggacttcacccagcaaaccccttatgcctatttgaaccaggtggcgccgttgactgagggcgagcatgtggttgaggcgatcctcgccgatgccgccgagtgcaagttgttgcagatcgagccgagcgagccgtgcctgttgattcgccgacgcacctggtcgggtcgccagccggtgactgcggcgcggttgatccaccccggttcccgtcacagcctcgaaggacgtttcagcaaatgagtactgtgaaagtctggcgcgccgccgactacgtgcgcatgccgtggaagaacggcggtggtagcacggaagaaatcgcccgcgatgcgggcaccggcctggatggatttggctggcgtttgtcgattgccgacattgccgaatcgggtgggttttccaccttcgccggttaccagcgcgtgatcaccgtgatcaaaggcgccggcatggtgctgaccgtggacggtgaggaacaacgtgggttgttaccgctacagccgttcgcgttcaagggcgaaagccaggtgtcatgccgcttgatcacggggccgattcgcgacttcaacctgatctactcgccacagcgttaccatgcacgcttgcagtgggtggatggcgtgcagcagtttttcagcaccgcgcagacggtgctggtgttcagcgtggcggatgaagtgaaggtgctgggcgagaagctcggccaccatgattgcctgcaggtggacggtaacacgggcctgctggatatcggcgtcactggccgctgctgcatcatcgaactgaccgcacgcggttaaaaactgtgggagcaggcaagccagctcccacatttgtttttttgcattgttcacaaaatctgtttccactccgcgcaccaatttgttaccgaacgccccagcgtgacgcaaagccacgctgtcgtgacaaatcctctttgctgtaaaacgcctccgtaagaaatttcatcaagcctccaagccttgattatcaaggcttgcgcgcgccttggaaaaaaatctgcaaggctcatttcaaaagttggccgctcgattgcatatgcttgtacatacaagtaaagatgtgtgcgtaagacctcgcaccatcagtgtccgcgcatcgatcgccgaggagtcctagctgtgaccaagcctacaaaataccgtgacgtcgaaatccgcgccgcccgcggtaacaagctcaccgccaaaagctggctgaccgaagcgccgctgcgcatgctgatgaacaacctcgacccgcaagtggccgagaaccccaaggaactggtggtgtacggcggtatcggccgtgcggcgcgcaactgggagtgctacgaccagatcgtcgagagcctcactaacttgaacgacgacgaaaccctgctggtgcaatccggtaagccggtcggcgtgttcaagacccacagcaacgccccgcgcgtgctgattgccaactccaacctggtgccgcactgggccagttgggagcatttcaacgaactggatgccaagggcctggccatgtacggccagatgaccgccggcagctggatctacatcggcagccaaggcattgtccaaggcacctacgaaaccttcgtcgaagccggccgccagcactacaacagcgacctgaccggccgttgggtactcaccgccggcctcggcggcatgggcggcgcgcagcctttggccgcgaccctggccggcgcctgctcgctgaacatcgagtgccagcaagtcagcatcgacttccgcctgaacagccgctacgtcgacgagcaggctaccgacctcgacgacgccctggcgcgcatcgccaaatacaccaaggaaggcaaagccatctccatcgcgttgctgggcaacgccgcagagatcctgccggaactggtcaagcgtggcgtgcgcccggacatggtcaccgaccagaccagcgcccacgacccactcaacggttacctgccggccggctggacctgggacgaataccgcgctcgcgccaagaccgagccggccgccgtgatcaaggccgccaagcagtcgatggccgtacacgtcaaagccatgctcgaattccagaagcaaggcatcccgaccttcgactacggcaacaatatccgccagatggctcaggaagaaggcgtggaaaacgcgttcgacttcccaggtttcgtaccggcctacatccgcccactgttctgccgtggcatcggcccgttccgttgggcggcgctgtccggcgacccgcaagacatctacaagaccgacgccaaagtcaaagaactgatcccggacgacgcccacctgcacaactggctggacatggctcgcgagcgcatcagcttccagggcctgccggcacgtatctgctgggtcggcctgggccagcgtgccaagttgggcctggcgttcaacgaaatggtgcgcagcggcgcgctgtccgcgccggtcgtgatcggccgtgaccacctggactccggctcggtcgccagccccaaccgcgaaaccgaagccatgcaggacggctccgacgctgtgtccgattggccactgctcaacgccttgctcaacaccgcgagcggcgccacctgggtctcgctgcaccacggtggtggcgtgggcatgggcttctcccagcactcggggatggtgattgtctgcgacggtactgacgaagcggccgagcggattgcccgcgtgctgcacaacgacccggcgaccggggtgatgcgccatgccgatgcgggttaccagatcgctatcgactgcgccaaggagcagggcctgaacctgccgatgatcaagtaacggccggcgcagtacttgtgggagctggcttgcctgcgatgcagacgacgcggtctggaagtacgaccgaggtgatgctatcgcaggcaagccagctcccacagaagagcaagatgcgtacaaaacaatccatcagaggttgaacaacatggctgcaaacgacaccaccccgttgatcgagaaacgttcgatcgactacatcccggaagcggaaagacatggtcgtctattcagtcaattcaccctgtggatgggtgccaacctgcagatcactgcgattgtcaccggggcgttggccgtggtgctgggtggtgatgtgttctggtcgttgatcggcctgctcatcggtcaactgatcggcggtggcgtcatggcgctgcatgcggcgcaagggcccaagcttggcctgccgcagatgatttccagtcgggtgcagttcggcgtttacggcgcggccattccgattgtgctggtgtgtttgatgtacctgggcttcaccgccaccggtaccgtgctgtcgggccaggcgctgggccagttgttcggggtcagcgacagcgtcggcatcctgatcttcgccagtgtcatcgtgctggtcacggtgctgggttacagggtgatccacttcatcggccgggtcgccagcctgattggcgtggttgcctttgtgtacctgttcagccgcttgatgagccagaccgacgttggcgcgctcctgcagatccgccacttcagctggagcagcttcctgctggccgtgtcactcgcggcctcctggcagatcgccttcgggccgtacgtggcggactactcgcgttacctgccgagccacacgtcatcggtgaagaccttcctcgcggctggcgcaggttcggtcatcggtgcccaagtggcgatggtcctcggcgtgtttgccgcggccatgtccaacgggcagtttgccggccacgaggtggcgtacatcgttggcttgagcggcacgggggctaccgctgcgttgctgtacttcagcatcgcgttcggcaaggtcaccatctcgacgctcaactcctacggcagcttcatgtgcatcgccaccatcatcagcggctttcgtgggcgtctggaggtcacgcgtctgcagcgtctggtgtttgtgctgatgatcgtcggcacggccacgctgatcgcgttgcttggccagcattcgttcctcggtgcattcaagtcgttcatcctgttcctgctggcgttctttacgccctggagcgcgatcaacctggtggattactactgcatcacccgcgagcgttatgacgtgccggcgctggccgacccgaacggtcgctacggccgttggaacctgctgggcatcagcgtctacgtattcggcgtgctggtgcagttgccgttcatctccaccaagttctacaccggccccctggtggcagcgctgggggatgtggatatctcctggatcatcggcctggtactgccggcggccctgtattacgtgtgtgcgaaaaaatggcacggcacggtacccgatcacctgatcctgccaaaagagcagggcgctttacccataacaaacgagctggctgcacaagcctgatgggacgtggacagggcaggacgcctactgactgccgtaatccatttcatgattgggagcgtcacaacaatgactatgaataagaccttgctggctactctgttcgcagctggcgtgctggcaagtgccggcgcccaggcagccggttggtgcgagtcgggtaaaccggtgaaattcgcgggcctgaattgggaaagcggcatgttgctcaccgacatcctgcaaaccgtgttggaaaaaggctacgactgcaaaaccgacagcttgccaggcaattccatcaccatggaaaacgccctgggcagcaacgacatccaagtgttcgccgaggagtgggtaggtcgcagcgaggtctggaacaaagccgagaaggccggcaaagtcgtcggcgtcggtgctccggtggtcggcgcggtagaaggctggtacgtgccgcgctatgtgatcgaaggcgacgccaagcgcaaactcgaacccaaggccccggacctgaaaagcattgccgacctggccaaatacgcctcggtgttcaaggaccaggaagaaccgtccaagggccgtttctacaactgcccggccggctggacctgcgagctggacaacagcgaaatgctcaagagctacggcctggaaagcacctacaccaacttccgcccgggcaccggcccggcgctggatgcggcggtgctgtcgagctacaagcgcggcgaaccgattctgttctactactggtcaccgacgccgctgatgggccaggtcgatctggtcaagctggaagaaaagcccggcgtggataaaagcgtgagcatcaaggtcggcctctccaaaactttccacgagcaagccccggaactggtggccgtgctggaaaaggtcaacctgcccatcgacctgctgaaccagaacctgggccgcatggccaaagaacgaatcgaatcgccgaaactggcgaaaattttcctcaaggaacatcctgaagtctggcacgcctgggtgagcgaagacgcagccaagaaaatcgacgcggccttgtaggtcaagggtgcacggctaccctcaagggtggccgggcggctggccacaacccactggatcgagagcacgatatgtttcctgagagttttaccttttccatcgccgactgggtcaacggttgggtggacgcactggtcaccaactacggcgatgtgttccggcacatctccgacacgctgctgtgggccatcgtcaacctggaaggcctgctgcgcgcggcgccctggtggctgatgttggccatcgtcggcggtattgcctggcacgccacccgcaaggtggtgaccaccgcagtgattgtcggcttgctgttcctggtgggcgcggttggcctgtgggacaagctgatgcaaaccctggcattgatgatggtggccacggtgatctcggtgttgatcggcatccccttgggcatcctgtcggcgcgcagtaaccgcctgcgttcggtgctgatgccgttgctggacatcatgcaaaccatgcccagcttcgtgtacctgatcccggtgctgatgctgttcggcctgggcaaggtcccggcgattttcgccacggtgatctacgccgcgccgccgctgattcgcctcacagacctgggtattcgccaggtcgatggcgaagtcatggaagccatcaacgccttcggcgccaaccgctggcagcaactgttcggcgtgcaattgccgctggcgctgccaagcatcatggccggtatcaaccagaccaccatgatggcgctgtcgatggtggtgatcgcctcgatgatcggtgcccgtggcttgggtgaagacgtgctcgtcggcatccagaccctcaacgtcggccgcggccttgaagccgggctggcgatcgtgattctcgcagtggtcatcgaccgcattacccaggcttatggccgcccacggcatgaggcgagcaaatgacgactgtcagcaaaatcgaagtcaaaaacgtcttcaagattttcggcgcacgcgcccaggatgcgctggccatggtaggccagggcaagaccaaggaccaggtactggccgagaccggttgcgtggtcggtgtgaatgacctgtccctgagcatcggcaccggtgagatcttcgtgatcatgggcttgtcgggttcgggcaaatccaccctggtgcgccacttcaaccggctgatcgaccccaccagcggcgcgatcctggtggacggcgaagacatcctgcaactggacatggaagccctgcgtcaattccgtcggcacaagatcagcatggtgtttcagagcttcggcctgctgccgcacaagagcgtgctcgacaacgttgcctacggcctcaaagtacgtggcgaaaccaagcaggtctgcgccgaacgtgcgttgcactggatcgaaaccgtgggcctcaaaggctacgaaaacaaatacccccaccagctgtccggcggcatgcgccagcgcgtgggcttggctcgcgccttggcggccgacaccgacatcatcctgatggacgaagccttcagcgccctcgacccgttgatccgcgccgagatgcaagaccagttgctggagctgcaaaagaccctgcacaagaccatcgtgttcatcacccacgacctcgacgaggccgtgcgcatcggcaaccgcattgcgattctcaaggacggcaagctgatccaggtcggcaccccgcgagagattctgcactcgccggcggatgagtatgtggaccgctttgttcagcgccgggcggcggtggtctgatccgggctgtgttgatcgttcccacgctccgcgtgggaacgcatttcgtgacgctccgcgtcacttggggggacgcagagcgtcccaggcggcgtacccacgcagagcgtgggaacgatcaatgctgcctaagaattgaagaaggtataaagatgtcccaggcaaccaaaatcatcatcgccgacacccccatgcgctggcaggacgtcaccgccgtcgcccgccacggcgcggtgctcgaactgtcgggccacgcctgggcgcgcatcgacaatgcccaagccatcgtgcagcgcatcgtcaccagcggcgagcgcgcctatggcgtgaacaccggcctgggcgcgctgtgcaacgtctcgctcaagaccgagcaactgagccaactgtcgcgcaacacattgctgagccacgcctgcggcgtcggcccggtgctcagcgatgagcagacccgcgcgatcatttgcgcggcgatcatcaactacagccacggcaagtccggcctgcatccgcaggtggtgcacgcactgctggcgctgctcaaccatggcatcaccccgcaagtgccgtcccaaggctcggtggggtacctgacccacatggcccatatcggcgtggccctgctgggcgtcggcaatgtgagctaccgaggccagatcgtcacggcgcaacacgccttgcaggctgaaggtttgcagccggtggtactcggcgccaaggacggcctgtgcctggtcaatggcacgccgtgcatgaccggcctgagctgcctggccctggctgatgcgcatcacttgctgcaatgggccgacgtgatcggtgccatgagcttcgaagcccagcgcggccagatcgacgccttcgatgaagccatcatcgccctcaagccacacccaggtatgcagcaagtgggtatcaacctgcgtgccctgctcgacggcagtgaggtgatcgccagcagcaaaggtattcgcacccaggacgccttgagcattcgctcgatcccgcagattcacggcgcggcccgcgaccaggtggaacacgccacgcgccagatcgaaaccgaactcaacagcgccaccgacaacccgctggtgctgggcacgccggataattaccgtgtggtgtcccaggccaacccccacgggcagtccgttgcgatggcggccgacatactcgccatcgccatggccgagatcggctcggtggccgagcgccgactggaccgtctggtcaacccgcatgtcagcggcctgccagcctttctggtgagcaacccgggcgtcaattccggaatgatgatcgtgcaatacgtcgccgcgtccttgtgcgggcagaaccgccagttggcgcaacctgccgtgctcgacaacttcgtcacctcgggcctgcaggaagaccacttgagcatgggcaccaacgctgcgctcaagctgcaccaggtgctggccaacgtcacccagattcttgccatcgagtacctgctggcggcccaggctttcgagtttctcaagggccagcgcttcggcgccggtaccgaccgcgcctggcggctgctgcgcgaagaggtccctgcctatgaacaggaccgttggctggcgccggatattgccgccgctgcccagctgcttaaaaacactgcattaccgaatttgcactgaacacctaagaacaattcacaaggagtatgaatgtgactgcgctaaacctgattccaggccaactgagcctcgcccaactgcgtgccatctaccagcagccagtaaccctcagcctggatgacagtgcctcggcccagatcgaagccagcgttgcctgcgtggagcagattctcgccgagaaccgcaccgcctatggcatcaacaccggttttggcttgttggcctcgacccgcatcgccagcgaagacctggaaaacctccagcgttccctggtgctgtcccacgccgccggcgtcggtgagccgatcagcgatgcgctggtgcgactggtcatggtgctcaaggtcaacagcctgagccgtggcttctccgggattcgtcgccaggtgatcgacgcgctgatcgcgctgattaatgccgaggtgtacccgcacattccgctcaagggttcggtcggcgcctccggtgacctggcgccgctggcgcacatgtccctggtactgcttggcgaaggcaaggcgcgttacaagggcgaatggctggaagccaccgaggcactgaaaatcgccggcctcacgccgctgaccctggccgccaaagagggcctggccctgctcaacggcacccaggtgtccacggcctacgccctgcgtggcctgttcgaaggcgaagacctgttcgccggtgccctcgcgtgcggcggcctcaccgtggaagcggtactgggttcgcgctcgccgttcgatgcgcgtattcatgcggcacgtggccaacgtggccagatcgactcggcagcggcctatcgcgacctgctcggtgagagcagccaggtgtcccaatcgcaccagaactgcgacaaggtacaagacccgtactccctgcgttgccagccacaggtcatgggcgcctgcctgacccaattgcgccaggccgccgaggtgctggtggtagaagccaacgcagtgtcggataacccgctggtctttgccgccgagggtgacgtgatttccggtggcaacttccacgccgagccggtggccatggcggccgacaacatggcgctggccattgccgaaatcggctccctgagcgagcgccgtatctcgttgatgatggacaagcacatgtcgcaactgccgccgtttctggtgggcaatggcggggtgaactccggtttcatgatcgcccaggtgaccgcagccgcgctcgccagcgagaacaaggcactggcccatccccacagcgtcgacagcttgccgacctcggccaaccaggaagaccacgtgtccatggccccggctgcgggcaagcgtctgtgggaaatggccgagaacacccggggcatcctcgcggtggaatggctcgcggcgtgccagggcctggacctgcgcgacggcctgaagacctcgcccaagctggaaaaagcccgtggcatcctgcgcggcaaagtggcgttctatgacaaggaccgtttcttcgcccccgacatcaacgccgccagcgaactgctcgccagccgctgcctgaatgagctggtgccggccaggttgctgccaagcctctgaccgcgactcggtctgtgcctgatcattcccacgctccgcgtgggaatgcatcctgtgacgctctgcgtcaccgctcttaaagcggacgcggagcgtccaggtcggagttcccacgccgagcgtgggaacgatcttctcctcataagaataattagggacgagaaatgcaccagccagaaaaaggtttgaaacgcgggctcaacgcccgacatattcgcttcatggccctgggttccgcgatcggcaccgggttgttctatggctctgcctccgccatccagatggccggcccggctgtgctgctggcctacctgatcggcggcgctgcggtcttcatggtgatgcgcgccctcggcgagatggctgtgcacaacccggtgtccggctccttcggtcagtacgccagcacctacctggggccgatggccgggtttatcctcggttggacctacgcctttgaaatgatcatcgtctgcctcgccgacgtcaccgcgttcggcatctacatgggcttctggtttcccgaagtggcccgttgggtctgggtgcttggcatcgtgtttttgatcggcggcctgaacctgtgcaacgtcaaagtctttggcgagatggagttctggctgtcgctgctcaaggtcggcgccatcgtggcgatgatcctcggcggttttggcatcatgctgttcggcattcactcggcaggcgaaacccaggccagcggtctgagcaacctgtgggctcacggcggcttcatgcctaacggcatcggcgggttaattgcctcgtttgcggtggtgatgttcgcctttggcggcatcgaaatcatcggcatcaccgccggtgaagccaaggacccgcaacgcgtgatccccaaggcgatcaacgcggtgccgctgcgtatattgctgttctacgtgctgaccctgttcgtgttgatggcgatctacccgtggccgcagatcggcagccagggcagcccgttcgtgcagatcttcagcaacctggggattggctcggcggcgactatccttaacatcgtggtgatctcggcggcggtgtcggcgatcaacagcgacatcttcggcgccggccgcatgatgtacggcctggctcaacaagggcaggcgcccaagggcttcgcgcaattgtccaaacaaggcgtgccgtggatgaccgttgtagtcatgggcgcggccttgctcggcggcgtggtgctcaactacctgatcccggaaaacgtattcctgctgatcgcctcgattgccaccttcgccaccgtgtgggtctggctgatgatcctgtttacccaggtcgccatgcgccgctccatgaccaaggcgcaggtcgccgaactgaaattcccggtgccgttctggccctatgcgccggcagcggccattgtgttcatgctgtttgtgtttggtgtactcggttacttcccggacacccaggcggcgttgatggtgggcgccgtgtggatcgtgctgctgatcatcgcctactggctgtgggtcaagcctgccgccgggcaaacggccaaggtcgattacgacccggtcttgtctcatcgataacttagggaggcgttgatgaaaacgctttggcaacactgccacgtcgcaaccatggccaacggtaaatactcgatcatcgaggatgccgccatggtgactgccggctcgctcatcgagtgggtcggcccccgcagccaggcgccgacggcggattacacccaggtgcatgacctgcaaggcgcgtgggtcacccccgggctgatcgattgccacacccatacggtgtttggtggcaaccgcagcggcgaattcgagcagcgccttgaaggcgtcagctacgccgagatcgcggccaagggcggcggcattgccagcaccgtgcgcgcaacccgtgcggcgagcgaagatgagctgttcttgagtgccgaaaagcgcctgcgtagtttgctgcgtgacggcgtgaccacggtggagatcaagtccggctacggcctggacctggccagcgaacgcaagatgttgcgcgtggcccggcgcctgggtgaagcgctgccggtcagcgtgcgcgccacgtgcctggccgcccacgcgttgccgccggagtacaaagaccgtgccgacgactacattgagcacatctgcaaggagatgctgccggcgctggcagcagaagggctggtggatgcggtggatgccttctgtgaatacttggccttttcccccgaacaggtcgagcgcgtattcaaggttgcccaacagcttggcttgcccgtgaagctgcacgccgagcagctctcatcgctgcacggctccagcctggcggcgcgttaccacgcgttgtcggccgatcacctggaattcatgaccgaagaagacgctatcgccatggccgctgccggcaccgtcgccgtgttgctgccgggcgctttttacttcctgcgtgaaacccagttgccgcccatggacgccctgcgcaagcacggcgtgaagatcgccatcgccagcgaccttaaccccggcacctcgccggcgctgtcggtgcggctgatgctgaacatggcctgcaccctgtttcgcatgaccccggaagaagccctggccggcgccacgcaacacgcggccaccgctttgggcctgggcgatacccatggttcgctggaagtgggcaaggtcgcggactttgtcgcctggcagatcgaccgccccgccgacctggcctactggctgggtggcgaactggataaacgcgtcgtgcgccacggcgtcgacgtcactgtttgagaggatgctgttgtggataaggttctgacgttcaaacaaggccgcgtaccgctgctgatcagcatgccccacgccggcctgcgcctcacccctgcggtccaggacgggttgatccccgaggcgcaaagcctgccggacaccgactggcatatccccctgttgtatgactttgcccaagagctgggcgccagcaccctggcagcggagtactcgcggtttgtcatcgacctgaaccggccttccgacaacacgccgctatatgccggcgctactaccggcctgtacccagagacgctgttcgacggcgtgccgttgttccgtgcagggcaaacgccctccgacgaagagcgggccagctacttgcaaaaaatctgggggccgtaccatcgccaactgcaagaagaactggcgcgcctcaaggccgaattcggttatgcgttactgttcgacgcgcactcgatccgctcgttgatcccgcacctgtttgacggcaaattgccggacttcaatttgggtactttcaacggcgctgcgtgcgacccgcagctggccagccagctggaagccatctgcgctcagcatccgcaatacacccatgtgctgaatgggcgcttcaagggcggccatatcacccgtcactacggcaacccggcgcaggatatccatgcggtgcagctggagttgtgtcagaacacctatatggaggagttcgaaccgttccgttatcgccctgatctggccgagccgacgcaggtggtgttgaggcagttgctggaagggctgttgacttgggggcagaagcactaccggtaattgttgctgctgctgcaatagctttcgcgagcaagcccgctcccacacttgaccgcgcgctatcatgagaatgcgctccaaatgtgggagctggcttgcctgcgataacggtggttcagcaacacttttatcaactgacacaccgccatcgcaggcaagccagctcccacactgtcgccaagaccgaagcttctacccgcgatgactcatccctggctggcctgcgccaaacctacaaccgcatgtgctatcgctccgaagcgcctgatccagcagaaggctggcccacggttgtttgcgggctcgcggccaagtgccagaggtggatcggctgtatgactatctgctcggttatctgaggcgcgaactgctgacacaggtctaagtgctcaaggacatgctcattgcacaattcgggtttatgatgccagacggcaaaataatagacgtccccccagggatgaacccgacaccctacggagcacgcaatgcagacttggtacccgcagatcaaaccctacgcccggcacgatctggctgtcgatgacacccacaccctgtatgtcgatgaaagtggctcccccgaaggcttgcctgtcgtgttcatccatggcggccccggttccggttgcgacgcccagagccgctgctatttcgacccgaacctctaccatattgtcaccttcgaccagcgtggctgcggccgctccacgccaagggcgagcctggagaacaacaccacttgggacctggtcgccgaccttgaacgcatccgcgagcacctgggcatcgacaagtgggtgctgttcggcggctcctggggctcgaccctggccctggcctacgcgcaaacccatcccgagcgtgtgctcggcctgatcgtgcgcggcatcttcctcgcccggccccaggatattcgctggttctaccaggagggcgcgagccgtctattcccggattactggcaggactacgtggccccgatcccggtggaggagcgccacgacatgatcgccgcttatcacaagcggctgaccggcaatgaccagatcgcacagatgcacgcggccaaagcctggtcgggctgggaaggccgcatgctgggcctgtgcccgagcccacaacatgtggagcggttttccgagccgcagcgcgccctgtccatcgcacgtatcgagtgccattacttcaccaacaactccttcctggaacccaaccagctgattcgcgatatgcacaagatcgcccatctgcctggcgtcatcatccatggccgctacgatatgatctgcacgctggataacgcctgggagttgcaccaggcctggcccaacagcgagttgcaggtgatccgcgaggcggggcatgcggcatccgagccgggtatcactgacgcgctggtacgcgcgaccggcgaaatggcccggcgcttgctcgacctgccgcctgaagaagcatgaagggcctgttgcagcgggtgcgtggcgcccgggtcgaggttgcgggtgaggtggtaggctcaatcgaccagggtttgctggtgctggtcgccgtcgagccttcagatacgcccgaaagcgccgacaaactgctgcacaagctgcttaactatcgggtgttcagtgacgaggagggcaagatgaacctctccctcaaggacatcggcggcggtttgctgctggtgtcgcagttcaccttggcggcggataccaagagcgggctgcggcccagcttctccacggcggctccaccggccctgggagcggcgctttttgatcacttgttgttacaagcgcaacaattgcatggcaaggtggcgtcagggcgttttggcgctgatatgcaggtgcacttggtcaatgatggccctgtgaccttcctcttacagacatgaatgtatgaaaagcgacgttaatgcctaaaaacgcagggtttcgctacaaatacttcactgtccctgatgcgttgtctcgcgggctactagataatcgcgcgctacggggatcagcgttgtttggtccatttttgacttaggtagagccttgtccgatggcctttggggaatcattttgcccttggggagtcggaacattgctcgccaacctggcatatagatagctggccgttggttttttgatctgttttcggcgagggttgctcgtgattgttagtccctgtaatgcaccaaaattgtctgccaaacggttacgaaacgcactggtgacgggctctgccctgttttgcctgttcggcgcgggtcaactgtgggcgttcagtctggatgatgtgtcggccaaggcgaaagagctggccgggcagaaatacgaagctccgcgcagcaatttgccgaacgaattccgcgaaatgaaattcgctgactaccagaagattcgtttccgcaatgaaaaagccgagtgggccgatcagaacaccccgttcaagctgtccttctatcaccaggggatgcatttcgacaccccggtgaaaatcaacgaagtcaccgccgacagcgtgcatgaaatcaagtacgacccgacgcgtttcgatttcggcgatgtgaaatttgatcctaaagccaccgaacagttgggttacgccggtttccgtgtgcttttcccgatcaacaaggccgacaagcaagacgaaatcatgaccatgctcggcgccagctatttccgcgtcgtgggcaaagaccaggtgtatggcctgtctgcccgtggcatggcgatcgacactgcgttgccgtctggcgaagaattcccgcgtttcaccgagttctggatcgagcgtccaaaaccgggtgacaagcatctggtgatctttgcgctgctggattcgccacgcgccactggcgcctaccgcctgatcctgcgccctggcaccgataccgtggtggacgtcaaatcccagatgttcctgcgtgacaaggtcagcaaactgggcgttgcgccgttgacctcgatgttcctgttcggcgccaaccagccgtccaaggtcctcaactaccgtcgcgagcttcacgattccagcggcctgtcaatccacgccggcaatggcgagtggatctggcgtccactgaacaaccctaaacacctatcggtcagcaacttcagcgtcgagaacccgcgtgggttcggcctgctgcagcgtggtcgcaacttcagccactacgaagacctggacgacaattacgacaagcgcccgagcgcctggatcgaacctgaaggcgattggggcaaaggctccgtcgacctggtcgagatcccgactgccgatgagaccaacgacaacatcgtggccttctggagcccggccgaactgccggaagtcggcaagccgctggacgtggcctaccgcctgcactggacattggacgacgcggccttccattcgccggacagtgcctgggtcaagcagaccctgcgctccaccggtgacgtgaagcaatccaacctgatccgtcagcccgatggcagcgtggcctacctcgtggacttcgagggcccgtccctgaagaaactgctgccggacgctccggtacgtagccaggtgagcgtgggtgataacgccgaactggttgaaaacagcgtgcgttacaacgaacacaccaaaggctggcgcctgaccctgcgtatgaagatcaaggacgcaagcaagccgaccgaaatgcgtgcggcgctggtgcaagatatcgtgcagcctgagcctgagtcggtttccaaccatgtgctcaaggccgacaaagtcttggccaagcagcatgagaagcaggccaagaaagacgccaaggacaaggaagccaaacagcctgaggctgccccagccacaccggagccgatcaagaccgagcaagtcctgaccgaaacctggagctatcagttgcctgccgatgagtaattctcaagtcaagccagagactctgtccgagtacctggcgcatctacccatgacggctgagcagcgcgccgagctggcgggctgcaagtccttcagcgagttgcacgaacgtctgtcgtccaagaccttcgacgcaccggccgacgctgcccaagcgtcggttggccgccgcttgaccctcaacagcgccgaagagctgcaagacgccgagatgctggcgctggatgccagcggtcgcgtgtgcctgaaggccacgccgccgattcgtcggaccaaagtggtgcccgagccttggcgcaccaacatcctggtgcgcggttggcgccggatgaccggtcgcaccaacccgcccaagccaccgaaagacgagcgggtactgccggctgcgcgctggcgtaccgtgggctcgatccgtcgttacatcctgttggtgctgatgctgggccagaccatcgtggccggctggtacatgaaaggcatcatgccgtaccagggctggtcgctggtcgacttcgacgaaattcgcaaccagaccctgctgcaaaccgctacccaggtactgccttacgcactgcaaaccagcatcctgatcatgttcgggattctgttctgctgggtgtcggctggtttctggactgcgctcatgggcttcctggaactgctgactggtcacgataaataccgtatctccggtaaaagtgccggtgacgagccgattcccaaggatgcgcgcaccgccctggtgatgccgatctgtaacgaagacgtgccgcgtgtattcgccggtttgcgtgcaacgttcgaatcggtggccgcgaccggtgacctggatcgcttcgatttcttcgtgctcagcgacagtaacgacgccgacatctgcatcgccgaacagcaagcctggctcgacgtatgccgcgaagccggtggtttcggcaagatcttctatcgccgtcgccgccgccgcgttaagcgcaagagcggcaacctcgacgacttctgccgtcgttggggcggtgactacaagtacatggtcgttcttgacgctgactctgtgatgagcggcgagtgcctgaccagcctggtgcgcctgatggaagccacgccggatgccgggattatccagaccgcgccgcgtgcgtcgggcatggacaccctgtatgcgcgcatgcagcagttcgctacccgcgtatacggcccactgtttaccgccggcctgcacttctggcagttgggtgaatcccactactggggtcacaacgctattatccgtatgaagccgtttatcgagcactgcgccctggcgccgttgcccggtaaaggcgcgtttgccggtgcgattctttcccacgacttcgttgaagccgcgctgatgcgccgtgccggctggggcgtgtggattgcctacgacctgccgggcagctacgaagaactgccgccgaacctgctggatgaactcaagcgtgaccgtcgctggtgccacggtaacctgatgaacttccgcctgttcctggttaaaggcatgcacccggtgcaccgtgcggtgttcctcaccggcgtgatgtcttacctttcggcgccgttgtggttcttcttcctggtgctgtccacggccttgctggcggtgaacacgctgatggaaccgcagtacttcatggctccgcgccagttgtacccgctgtggccacaatggcacccggacaaggcggtggcgcttttctccaccaccatcgtgctgttgttcctgcctaaactgctcagcatcatcttgatctgggccaagggcgccaaagagttcggtggcaagttcaaggtgaccctgtcgatgctgctggagatgttgttctccatgctgctggcgccggtgcggatgatcttccacacccgtttcgtgctcgccgcgttcctcggctgggccgctacctggaactcgccgcaacgtgatgacgactccacaccttggagcgaggcggtcaagcgccacggtccgcaaaccgtgctgggctttttgtgggcgctgctggtggtgtggctgaacccaagcttcctgtggtggctggtgcctatcgtcggttcgctgatgctgtcgatcccggtgtcggtgatttccagccgcgtcaagttgggcctcaagtcccgcgacgagagcctgttcctgattcctgaggaatacaatccgccgcaagccctgctgtcgaccgagaagtacacccacgaaaaccgttggcacgccctcaatgacggctttgtgcgttcggtggtcgacccgcagcagaacgccctggcctgcgccttggcgacctcgcggcaccgtgaggccgagcccatcgagtacctgcgcatggagcgggttcgccacgcgttgaaagtcggcccggccggcctcaacaacagcgaacgcctggccttgctcagcgacccggtggccctggctcgcctgcatgagcaggtgtggagcgaaggccatgccgagtggctcggcgcttggcgtgcctcgatcaaggctgatccgcacgcgccattgctgcccctgcaaccacagtcgccccaggcccaaccggcctgattcaggcacccccgaaggctcacttcgggggtgtttcaaacgttggtcctacagcgtttttagccccttcctttttattcctaactccttgttatttcgaaacaaaagacctttgttcgaagcgtattgccgtgcctgcggctgggttaggatcgccccccacattggactcgccacgggggcattcatgatcaaaaggtattgttttgcattgctgatgggctttttcctggggggacatgcaggcctgctttacgcgggcgcgctggacaacgctgtgcgccgtggcgtacttaaagtcggcaccacccccaataacgtgccgttcgaaatgctcgataagcagggacgcatcgtcggctttgaaattgacttgctccacgccatgagccgcgcgctgggcgtagaacttgaattggtagcggtgccctacacagacttactgccagggctattggcgaacaagtttgatctgattggcagcggcatgacggtcactcaagagcgcaacctcaagctcaacttcagtgactcgtttatcgtggtgggccagacagtgttgctgcatccgcgcctgggcgggctggtcgccagtattgaagaactggacgacgccagttaccgcgttgttgctacccaaggcaccaccggcgaagccgcggcacagcgctttctcgtatctgcgcggctcagcagtgtggccaacccggaagaaggcgtgcggcaggttttagaaggcaaggccgatgcttttatccatgatgccccctacaacctgatcgcaatgactcggccgcagaacagcgcgttgttggcgctggaacaacccttcacctttgagcccttggcgtttggcctgaaaaaaggtgattacgacagcctcaattggatcaaccacttcctcaaccagatcgcccaggacggcacctacgatcgcctgcatgacaagtggttaagggacacggcctggatcgccgagatcgactgatcgtcataactgcttacacatcaacccctgatcgagaggccgcgctgaagcgtctgcgcctgcgcttctccgggccgctgtcagtgttttccgacacacaccgataacatttaccggtgaaacctttgtggcggacaacgagtgggttaggatcgctccccgaaatggcgcagccctctcgtgcgcccactttataagaatcgttcaggggtcttgatgatgaaaaagtatctttcgatgctgatgcttggcgtcaccgcgctggtcgctgccaccgtggcacaggccggcgccattgatgaggcggtcaagcgcggcacgttgaaagtcggcatggaccctacctacatgccgttcgagatgaccgacaagcgcggtgaaatcatcggtttcgaagtcgacatcctcaaggccatggccaagtccatgggcgtcaagctggagctggtgtccaccggctacgacggcatcatcccggccttcctgaccggcaagttcgacatgattggcagcggcatgaccctgacccaggaacgcaacctgcgcctgaacttcagcgaacccttcatcgtggtcggccagacgctgctgatccgcaaggagctggaaggcaccatcaagtcctacaaagacctgaacgacgagaaatatcgcctgacctccaagctcggcaccaccggtgaaatggttgccaaaaagctgatctccaaagccaagtaccacggctacgacaacgagcaggaaggcgtgctcgacgtggtcaacggcaaggctgacgccttcgtctacgacgcgccgtacaacgtggtggccgagaaaaaagtcggtaacggcaagctggtgttcctggacgaacccttcacctttgaacccctggcgttcggtttgaagaaaggcgattacgacagcatcaacttcatcaacaacttcctgcaccagatccgtaacgacggcacctacgatcgcatccatgacaagtggttcaagagctccgagtggctcaaggacatggaataaggcctgacaccgagttgcctgtatcgcaggcaagtcagctcccacatttgactgtattcacacatcaacctgtgggagcgggcttgcccgcgatggcggcctatcaggcgacacctatgcggaaagtgaaatgaaacagaaaaaagcccaatggccctggcacctgctgacggtggtcgtgctggtcggcctggcgggtgccttgtattacgccacctcgttgatgtcctacgagtggcgctggaaccgcgtcccacagtacttcgcctatcaagccgagacctcccagcgcgccgcggatatttccaccgtggtcgaactggtgcgcaacggcgatacggccgaagtcaccctgcgcaacgacgccggggtcgagcaaaagctcacggttgccgataacagcctgcaagtggcacgcggcgacgatgtggctgaaggcgatgtggtcggcgtgacccggcaatgggcactggggccgttgatgtggggcttgtggaccacattgtggctgtcggtagtgtccggcatcctgggcttggcgattggcttggcgaccgggctgtgccggctgtcgaaaaaccccaccttgcgcgacctgtcgacgatctacgtcgagctggtgcgcggtacgccgctgctggtgcagatcttcattttctatttctttatcggcacggtgctcaacctgtcccgggagttcgccgggatcgccgcgctgtcgttgttcaccggtgcctacgtggcagaaatcgtgcgcgccggcgtgcagtccatcacccgaggccaggacgaagctgcacgctccctgggcttgagcgccagccagtcgatgcgccatgtggtattgccgcaggcgttcaagcgcgtgttgccaccactggccgggcaatttatcagcctggtcaaggacacgtccctggtgtcggtgatcgcgattaccgagttgctcaagagcggccgcgaggtgatcaccacctcgttctcgccatttgaaatcctgttctgtgtggcgggcttgtacctgctgatcaacctgccgctgtcgaagatggccagccggcttgagcggaggctcgcccaaagtgattgaagtgcgcgatctggtaaaagtcttcgatacccgtgggcaagtggtgcgcgcggtggatcatgtcaccactcaagtggccaagggcgaggtgctggtggtgatcggcccctcgggctccggcaagtccaccttcctgcgctgccttaatgggttggaggaattcgattcgggttcggtgagcatcgacggcctgcaactggccgacccgaagaccgacgtgaatgcctaccgccgagaagtgggcatggtgttccagcacttcaacctgttcccccacatgaccgtgctggaaaacctgtgcctggcgcaaaaggtcgtgcgcaagcgcggcaagccagagcgcgaggccaaggccctggcgctgttggaaaaggtcggcatcgcgcagaaggcccacgagtttccatcgcgcctgtctggcggccagcagcagcgcgtcgccattgcccgggccctggcgatggagcccaaggtgatgctgtttgacgagcccacctcggccctcgacccggaaatggtcggtgaagtgctggacgtgatgaagaccttggccctggaaggcatgaccatggtgtgcgtcacccacgagatgggctttgcccgggaagtggcagaccgggtgttgtttttcgaccacggcaaactgctggaagacgccgccccggtcgaattcttcaatgcgccaaaagacccccgcgcccaagccttcctgcgccaggtcctatgactgtaggagcgagcttgctcgcgaaaaacgtcaacgataacgccacgcaccctgaatgaacgcggcggccttgggtttttcgcgagcaagctcgctcctacaggggtggtgtttcagagcttgaatttggcgaccagcgtctgcaaatccaggctcaaccgcgtcaactgaacactcgccgccgctgtttcctcgctggcggcggcggtctgttccgacacgtcccgcaccttcaacacactgcgattgatctcctcggccaccgcgctttgctgttccgccgcggcggcgatctgcgggttcatttcctggataaccgagaccgtgcgggcaatggcgatcagggcgtcgccggcgtcgcgggtcagggcgacgctgttgtcggtcaggttgcggctgctgtccatgatgtccgccacctgttgggtgccgttatgcaggccgaggatcagcccttcgatctcctccgccgattcctgggtgcgttgggccaggctgcgcacttcgtcggcgaccaccgcaaacccttggccggcagtgcccgcgcgcgccgcttcgatggcggcgttcagggccagcaggttggtctgctgagacacggatttgatcacgtccagcacactggcaatcttctggctctcctgttgcagcgcgagcatcgcacggcccgacagcgccatttcactggccaggttgccaatctgctccacggcctgggtgaccacctgctcaccagcgccggcctgctggtcggcttcattggctgccaccgaggcgcgttcggcgtggcgccccacttcctgggcagtggcgagcatttcattcattgccgtcgccacttggtcggtttcatctttctgctcgttgagcccgttgcgggtctgctcggtgaccgtggataactgcgtggccgcgccggcgatctgccgggcgctgtcaccaatactgctgatcaggctacgcaggttgcgggtcatttgcccgatgctttgctgcaactggccgagttcgtcgcgacggtctactggcatgtcatggctaaggtcgccctcggcaacacggtgggcagcgctgaggatttcccgcagtggcaccgcaatctgccgggcaatccaccaggcggccagcgcgccgagtgccagggccgccaccgtcacactgatcagcaatgtacgggtgtggtccgcctcgtcgttacgcttggcgttctggctctggctcaacaggttactgctttcacgcaggttattgagttgctgttcgaagcggttttgcacggtttccacgttgagctgggcttccttgagcttggtcagttgctctcgataattggccaggtcggtcttgagcagtgccgagtcgactggcagcgctgtgactgccgcttgcgcgatctccagggcgtcaagcgccttgccgagggtctctgcataagttgccagcgattgcgcggcccaggcggggctctgggctcgatcttcggccagctccatggcttgacgcagttgctcgatggcgtccagagccttttcgtcgttctggtcaggcaagtcactggcaaattgggcgagggtatcgctggcttgcagggcaattttcttcaggtccgggcgcaggcgctcgcgctgctcgaccaagggcggaagttgcgccagagctgccttgaagccgttggcgaggctcatggcgtcctcgagtcgctgcacgtcagtcgggtctttcaggcggtttgaaagggcggccaggtgctggtcgatccgttcaatcttcgcggccattttgcccaggctatcgctgtctgtgagggtgcggtacacgatgcggtcggcgcgcatggcctcggcatccaccgccagttgccccagggtcgtcagactgtcggatcggtaaagcacggcgttcaaggcttgccagcccgtagcggcaatcaggaagctgaggatcagcacttggccaaaccccagggcgagtttgaggcggacgctggcattgaccagcacgcgggtcagccgagaaaacatggtgaacctccgaatcagagaaagcgtttcgcgacacctgcaacgctaattcgattcgggcctgtggagggctgataactgcgtaggaaatttcacaagatgcggcggctttggtaagccgccgcgtagggtaattcagactcggaagcgcccgaccagggtctgcaggtagatccccaggcgcgccagttcggcactggaggacgcagtttcttcgctggccgacgaggtttgctcggagatgtcgcgcacattcaacacgctgcggttgatctcttcagccacggcgctttgctgctcggcggcggtggcaatctgcgagttcatcgcctggatggtcgagacggtgcgggtgatattgcccagcgcgtggccggcgcggcgcgtcagctcaacactgctctcggtcagcccgcggctgttgtccatgatggttgccacctgctgggtaccgctttgcaggccgacgatcagctcttcgatctcttcggtggacttctgcgtgcgctgggccaggctgcgtacttcatcggccaccacggcaaagccacgcccggcttcaccggcacgcgccgcctcgatggcggcgttaagggccagcaggttggtctgttgggccacggatttgatcacgtcgagcacactgccgatcttgtcgctttcgcgcttgagttcacccatggccaccgtggaattacccacttcggtggccaggcgctcgatctgggcgatggcttcccccaccacctggtcgccttcacgggcttgctggtcggcagccacggcggcttccgaggcctcttcggcgttgcgcgccacttcctgcacggtggcggccatttcgttcatggcggtggccacctggtcggtctcgaccttttggctgttgaccccggcgctggtttgttcggtcacggctgataactgctcggcggcgctggcgatctgggtgacgccgtcgctgatcccgccgatcaactcacgcaggcccacggtcatgctttgcatggcgcgctgcaattggcccagttcgtcctggcgacccgattccaggttgtggctcaggtcgccggaggctacgcgctcggcgactttgagggtctggttcagcgggatgacgatctggcgggtaatggcccaggccgcgaagatgccgacgatcagcgccagcacggtggcaagcagcaacaagtatttggcttgcgcggcatctgcgtcacgcacggcggtctgggagacggtgagcttttcgctgtggcccagcaggatgtcgccttgggcgatcatggtcttcagcgcagccgcgctggcgatctgggaatcgcgatactggctgacagcggcgcggtaggcttgcagtgatgccccggcttcttgcagattggcctggtattgcgcaggcaactggccttgcagctcggtgattttcttcagggcgttgtcgatggcatccagggccggttgctcggcttcgaccttgccgctgtaggtgtagccgcgtacctgaaagcgcgattgctggatcagcttgctctgctcgaccacgctgttgaactgggcaacgctgtcaccttgcagcagggctttttcgatttcgttgatcttggcgacggcattgtcggcagtgtcgccgagtttgctgcgcgcgccctcacgcttgagacccgcctggaccatggcggcgaaggcctttttgtattggttcaaggcttcctgctgttgctcgaccagggctttgtcgtcaggttgctcgatcagctcggacgcggtcttcaggccgctgtcgaggtgggcgagcaggccgtcgaccttgtccgtgccttgctcgccacggcgcatgtcgaagtccagacgtgccaggcgcaggtctttggtcaggccattgaggctggaaatgaatcccagcttgtcgccgcggctgatcacatcccccaggccggtccagccggtaaaggtgatcaacagcgtcaggagcaacaccaggccaaagcccacactcagcttgcggttgacgcttacattccccaacttctcggctaaccaacgatacatgctgcgaactcccctggaacaaggcttggacttattcaaaggctatcggcaacgcacggggatacttgatcgttcccacgctctggtgatcgttcccacgctctgcgtgggaatgaatggcgtgacgctctgcgtcacaagggcggacgcagagcgtcctgagcggcattcccacgcagagcgtgggaacgatcacccgatcactagagcgtgggaacgatcagtcggggggttagaacaggcgggcgagcagggccgttacggcggtttcgacgcgcaaaatacgcgcacccaactgcaccggctgcaaaccggccttggtcagcaggtccacttcatagggaatccagccgccttccgggccgatcgccagggttaccggttcttccagggctcgagggcaggccgggtaatcgcccggatggccgatcaggcccagagtgccagtcgccatggccggcagccggtcttcgacaaatggcttgaagcgtttctcgataatgatctcgggcagcagcgtgtcccgcgcttgctccaggccgaggatcagttgctcgcgcaccgcttcaggctccaggaacggggtttgccagaagcttttttccacccggtaactgttgaccaataccaccttgggcacgcccatggccgccactgtttgcagcacccggcgtagcatcttcgggcggggcagggccagcagcaaggtcaggggcagtttgctcggcggcggttggtcgaagctcacttgcagttcggcttcggcggcttccaggcgcagcaattgggcattgcccatcagcccgccaatgcggcccacgcgcagggtgtcgccgacggcggcgcggtgaacctcctgcatatgcaccaggcgccgatcacgcagcacgacgcggtcggccgcgataaagtcggcctcttcgagcagcagcaggttcacggctgggtcgctggcggctggtcgtcgtcgacaggcgcgtcatccgggtgttcgccacgcttgctgatcaagccgctgaacaggatgcccacttcgaacagcatccacatcggcacggccagcaaggtctgggagaatatgtccggcggcgtgaggatcatgccgaccacgaagcagccgatgatcacgtacgggcggatcttcttcaggtacttgacgtcgaccacgccgatcnnnnnnnnnnnnnnnnnnnnnnnnnnnnnnnnnnnnnnnncgaccacgccgatccacaccagcaacaccaccgccaccgggatttcgaacgccacgccaaaggcgaagaacagcgtcatcacgaaatcgaggtagctggtgatatcagtcatcatttccacaccagccggggtggcagcggcgaagaacttgaagatcagcgggaacaccaggaagtaggcgaaggccatgccggtgtagaacagcaggatgctcgataccagcaacggcacggcgatgcgcttctcgtgcttgtacaggcccggtgcgataaaaccccagatctgatgcaagatcaccgggatcgccaggaacagcgagaccatcatggtcagcttcaacggcgtcaggaacggcgacgacacatcggtggcaatcatcgtcgcgccggccggcaggtactggcgcaggggcgtcgagacgaaggtgtagatctgctgggtaaaggcgaacagcccggcaaagatgatgaagatcgccgccacgcaacgcagcaggcgggtacgcagctcggtgaggtgcgagaccagcggcatatgctggtcgttttccggtttatcagcgctcatggggctcgcggcggcaatgtagggtcatggggtgcgggcgacgcaacgggcgtcggcgcgggcgtcgttggggcgggcgctgcaggagcagcgtcggccacaggggctggcgcgatgctgtgctcggccaccggcgtgaccggcttggccggctcttgcaccggggacagaatcttgcgggcttcctgctccaacgagaggatgtgttcgttgtgcaattgccgacggatttcgtcggcaccgatttcccgttcaacttcctgtttgatcgcgttgaaactgcgttttagacgcccgatccacaagccggcggtgcgtgcggcaccgggcaggcgctccggccccagtaccagcagggccaccaggccgacgagcagcagttcagagaagctgataccaaacattagtcagtgctcacgagtctttgcgggtcggctcttggaccttttcagcctgaacgtcgaaggtacggcgttcggtgatcggctgggtggcctgcgggtgaacaggctgggccggtggcaccgggttggcgcttggctcggctggcttttcatcatcgttcatggctttgcgaaaacccttgatcgactcgcccacgtcggtgcccaggttcttgagtttcttggtgccgaacaccaataccaccaccaccagaatgacgatccagtgtttccagtcaaaaatgcccatgcttcaaatcctcaagtcttagttattcaggcggacgggcgcgaggccttctcggcgtgcccggacaagccgaagcgacggtccagttcatccagcacggcctgtgggtgctgccccagttgggcgagcatcaccaggctatggaaccacaagtctgcggtctcatagattacatcgctgtaatcaccgctgatttgcgcgtccttggccgcaatgatggtctcgacggattcttcgccgagcttttccagaatcttgttcaggcccttgtggtacaggctggcgacgtaggaactgtcggcatccgcgcctttgcggtcttccagcacctgggccacacggttcagggtatcgctcatgttcagtgtcctgctgggtagatggcgtgcgggtctttgagcaccggctccacaaccttccattcgccattctcgaacacgcgatagaagcaactgtggcggccagtgtggcaggcgatgccgccgatctgttcgaccttgaggatcaccacgtcggcatcgcagtccaggcgcagctcgtgcagggtctgcacatgtccggattcttcgcccttgcgccacagtttgccacgcgaacgtgaccagtagatggcgcgctgctcggcggcggtgaggctcagggcctcgcgattcatccaggccatcatcagcacgcgcccggtcttgtagtcctgggcaatggccggcaccaggccgtcactgtcccacttgatctcatccagccagtctttcatgttcggctccggcaatttgcgacagtgtataaccggattggctatcgacgcacgatcagataaacacccacggcgaccataatgccggctggccagtggcccagttggttcaatggcccgccgatcgccagcatcaccccgcccaccagatgcgcggcgccgagcaggcgcaggaaccaatcgtccttgcgcttgcgccacggtggctctgggtccttggcgtggggctgggacatgcgctccagcaggtcgcgggtcatgttggccaggtgcggcagctgttcgaactggctgtgcaggttgcccagcatggttttggggctcatgcgctcgcgcatccagcgttccagaaagggttgcgcggtgttccacaaatcgaggtccgggtacagctggcggcccaggccttcgatgttcagcagggtcttttgcaacagcaccagttgcggctgcacttccatattgaagcgccgcgcggtctggaacaggcgcatcagcacctggccgaaggaaatatcttttaacggtttttcgaagatcggctcacacaccgtgcggatcgccgcttcaaattcattgagcttggtttccgccggcacccagcccgaatcaatgtgcaactgcgccacacgacggtagtcgcgcttgaagaaggcaaacaggttgcgcgccaggtaatcctggtcttcgggggtgaggctgccgacgatgccgcagtcgatggcgatgtactgcgggctccacgggttgacggtgctgacgaagatgttgcccgggtgcatgtcggcgtggaagaaactgtcgcggaacacctgggtgaagaaaatctccacgccgcgctcggccagcatcttcatgtcggtgcgctggtcggccagggtcgcaaggtcagtgacctgcacgccgtagatgcgctccatcaccagcactttggggcggcaccagtcccaatacacctgcggcacgtacagcagttgcgagccttcgaagttgcgccgcaattggctggcgttggccgcctcgcgcagcaggtcgagttcgtcgtagatggttttttcgtagtcggcgaccacgtccaccgggtgcagcaggcgcgcatcggcggagaaacgttcggccgcgcgggcgaggacaaacagccacgctaggtcctggccgatgatcggcttgaggcctgggcgaatgactttcaccaccacttcttcgccggtcttgagttgcgcggcgtgcacttgtgccaccgacgccgaggccaggggctcgacgtcgaagcggctgaacacctcgctgatcttctggcccagctgttcttcgatcagcgccatcgactgctgcgagtcgaacggcggcacgcggtcttgcagcagcatcagctcgtcggcgatgtcttcgggcaacaggtcgcggcgggtggagaggatctgcccgaacttgataaagatcggccccaaatcctgcaacgccaggcgcaggctcgcaccacggctcaacggcgacggcttgcgcgggaaccagcgccatggcagcacataacgcaccgccagcaaaaaccacggcaaaggcagggcaaacagcaggtcatcgagacggtagcggattacgacgcgctggatacgaaacaaacggcggacggcgagcagcttcatgcgttatcgcttggatcaagggaacggctcaagcgctcgaagcgggcctcgaggcgttccaggtcgattttggccttgtcgagttcgcgaaagcgcgcttgcgcttcccgttgcccgaccagggtgcgcgattcttcgctcaggtattcggcgaggttctggttgaggctggcgaacccttgctggtaccagcgcgagcggctgcgcaggtgcccgctgatcaactgggtggcgacggggccgatccagcgcgacagttcgtattcccagtccagctccaggtcttgcagcacggcggccaggtccatcagcaccgcgctgtcgccttccagttccacttcggggctgtggaggatggcagtcttgttgcggctcagcgccaggtgcaacaggctggaggccggcgcacgcaaggtgcaatcggcttgggcggcccattgggtggcgagcagcaggccttcatcgctgggcaggataaacagctgcaagacggggctgcggcaatcgacggcaatgactttgccggtcaggtgcgcgagccgcgccagggcagtgctgtccaggcgcaggacacggttgaggccgtgctcgacgctggcgagaagaccttgcagcagcatcagggcttgatgccgcggtgcagggcgacgatgccggacgtcatgttgtggtaggtcacgcggtcgaaaccggcctccaccatcatcgacttcagggtttcctggtccgggtgcatgcggatcgactcggccaggtagcggtagctctcggcatcgttggtgatcaacttgcccatcaacggcatgaaggcgaaggagtacgtgtcgtagaccttggacatcagcgcgttggtcggcttggagaactccagcaccaacaggcggccacctggcttgagcacgcgcagcatcgagcggatcgcgtcctccttgtgggtcacgttacgcaggccgaaggcgatggtcacgcagtcgaaatggttgtccgggaacggcagcttctcagcgtcggcctggacgaattcgatattgccggccacgcctttgtcgagcaggcggtcgcggccaaccttgagcatcgagccgttgatatcggccaataccacctggccggtggggccaaccagcttggagaacttggccgccaggtcgcctgtgccaccggcgatgtccagcacccggttgccggtgcgtacgcccgacaactcgatggtgaagcgcttccacaggcggtgcatgccgccggagagcacgtcgttcatcaggtcgtacttggccgccacggagtggaacacctcagcgactttttccgccttttggctttccgggacgttcttgaagccgaagtgagtggtgggttcggcatcgctgcctttgcgctgatcagtcatatcgctgtcaccaaaagagaatgcgggacatgataatccccaaggcctactttgtcttggcaaggctgcaggtaagataggcgctcatcgagaccttttgccgcatggcgggtgttctgagtcgttataaagaggagtcattgcaatggcccgtattaccgttgagcgtgaacacaccctgggaaaagaacaggcgcgggccaaggctgagctattggcgcgcaaactcgaggataaatatggcgtggagttttcatgggctggcgacaccctgaagctcaagcgctccggggttaaaggcacggtgtgggtggccgatgattcgctgcgcattgatgtggaacttggcctgttgatgtcggccatgagtggcacgatcaagtccgaaatcgaaaaagccctggataaggccctggcctgatagggctgtgcttagggtgctgattctaattttaaaccctactttgtgcccaagccctcaactcttgcgggccgtccgccacccaatcctgtgtgaggtgcaccatggccaaagttattttgaagaaaaaaatcgacgttcagaccacccccctgaatgaggttaaaagctatgcccgcaagatctggctggcgggtcttggtgcctacgccaaggtcggcagcgagggcggcgagtacttcaaggaactcgttagaagcggtcaacgtgttgaaagtaaaggtaaaaaagttgtagttgaacaacttgatgccgccaacagtcagattgaccaagtaaagagtaacgtctccggcgtcaaaggcctggttgaagttcaactggataaagttgaaaaagcttttgatactcgtgtcgccagtgccttgaatcggatcggcattgcgtctaaacatgacgtggagacactctctgctaagctcgaagagctgacggcattgctcgaacgtgtcgcgcgtaaacactaaggagacatcgggatggctgttaaaaagactactcagaaagaaggcagctcgtgggtcgggaaagttgaagaatattcccgcaaaatctggctcgctggtttaggcgtgtactcgaagatcgacagtgacggcagcaaactcttcgagaccctggttaaagacggcgagaaagccgagaagttgaccaagagcacggttggtaaaaaagtcgacgctgccaaggcgagcgcgggttccgccaagtcgagcatttcggatacctggggcaagttggaagagactttcgacaaacgcctcaacagtgctatttcgcgactgggcgtaccgagcaaggcggagttgaaggcgctgcacagcaaggtcgataccttgaccaagcaaatcgaaaaactcaccggcgccaaagcggctcccgccaagatcgccgccgccaagcctgcagcaaaaccggcggccaaaccagcagctaaaaccgccgctgcaaaacccgccgccaaaactgccgccaagccgctggttaaagccgccgccaagccggctgcaaaacccgctgcgaaagcgccagccaaagccgctgcgaaacctgcggccaagccagcggctaaaaccgctgcggccaaaccggctaccaagcctgccgctaagccagtggccgctaaagccgccgcgaaacctgcagctaaaccggctgccaaacctgcggctaaaaccgctgctgctaaacctgctgccaagcccgccgctgcgaaacctgcggccaaacctgccgcggccaaaaagcctgcggtagcgaaaaaaccggcagccgcaaagcccgccgcaacggccaagccagccacggcgccagcaccggccgcttctaccgccaattcggtgtccgcaccgacgcacgcggctgctaccccgactgctacgccggctaccccgacgccatccagtcagtcctgatttctacgggacacaaaaaaacgcccggtctgcgaagatcgggcgttttttatgcaagcctgaaaaacgccgcatgccccatttttgtaggagcgagcttgctcgcgaaaaacttcaacgataacgggggcttcctgaatnnnnnnnnnnnnnnnnnnnnnnnnnnnnnnnnnnnnnnnnattcaggaagcccccgttatcgttgacgtttttcgcgagcaagctcgctcctacatgtttaatcaacgtcatccaggtacttcaaggcgaacttctcggtcgcctgccgcgccgtcggcagcagatgcggcgccaccagcatcatgatctggtacaccaccacccgcacttcaccttcacggtccagaatccgttggtaatccagggaaaacagcaacgtcagggtgatctgctccaccagttgccccaacgcctgggtatcactgaccagttgcccagccgccttcaaccgcgcaagcaatgacgccaatgtgcgcttgagcgccgtgagcaagtgacggatccccttggccagcttgggcaagcgcccggccaggttcgacaggtcctggaacaggaagcggtagtgggccatgcgctcgacaatcaggtgcaggaacagccagtaatcctcggcctccagttgcgcatcggcgggagggtccagcagtggcgccagctcacactgaaaacgctcgaacaacccgagcaccaagggctccttgccgtggaagtgatagtagaggttgccggggctgatccccatttcattggccacctccatggtcgatacgttcggttcgcccttgtggttgaacaactgcagggcacattcaaggatacggtcgcgggtcttcatccagtcttcttaaagttgatcgctgagctcagcgcacccgcacgtaagtgcccggcgccgcttccatcggtgggtaattctggttgcccagggcggtgagagtttcgcgttgtacaccggagcgtttttgcacccactccagccactgcggccaccaactgccctcgacgtgctgggcgtcgtaataccaggcgcgcgggtcgctgctcagcttggggttctcgacgtagttggccttggggttgcccggcgggttgaggatgctctggatatgcccgctgttggacagcacaaagcgccgctcgccacccagcagttgcgtggagcggtacaccgcatcccacggggtgatgtgatcgttgatcccggccacgctgaagctgtccaccgcgaccttgcgcaagtcgatgggcgtgccgcacacctccagcccaccgggatggctcagggggttgtgcttgaagaagtccagcaggtcgccgtgcaaggcggcgggcaggcgggtgttgtcgttgttccagtacaggatgtcgaatgccggcggttccttgcccagcaggtaattgttgatccagtaattccagatcaggtcgtttgggcgcatccaggcaaacaccttggccatgtcgcgaccatccagcacgccttgctggtaggagcggcgcttggcggcctccagggtttgctcatcggcgaacaaggttgcggggctgtcgatctggctgtccagcaggctcaccaggtaactggcgctggagatgcgccgcaactggcgcttggcttgcaggtggccttgcagcgcggcgatggtcaggccgccagcgcaggcgcccatcaggttgacctcgcgggcgccggtgatggcccggcacacgttgagcgcttcctccagcgccgccacgtaggtggacaggccccattcgcgatgccgcacgtccgggttacgccagctgaccataaaggtctgcaggccgtttttgagcgcgtattgcacaaagctgttggccgggctcaggtcgaagatgtagtacttgttgatttgcggcggcaccaccagcagtggcttggcgtactgtttttcgctcatgggcttgtattggatcagctccagcagctcattgcgaaacaccaccgaaccgggcgtggtcgccacggtcttgcccacttcgaaagcgtgcttgctgacctggcgcggcaaaccgttgttgtgcagcaggtcttcgaacaaattactcacgccacgcactacgctgttgccgccggagttgagcaactccttgatcgccagcgggttgagcagggtgttggaaggggacacggcatcgttgagcagggcgaaggcgaactgcgcgcgggcgcgatcatcgtcactgagggcgctgtcatcgatccactgccgtgtctgtttttgccagctcagataggcttgcaagctgcggcggtacagcgggttgagcttccaggtggggtcgctgaagcgatggtccctggggttgggttcgtgcacggtctcacccagcagcacgcggcccagttggccgctcagggccagggcgtggcgggcggtgtgcaccgggttgcgcaggccatgcgcggccacggtacgcagggtcgacagcaagtcccggccacgcaggccggtgatcgcattttgtgcgttgatgaacgtagcgggggtgggcgccgggttcgtcacgggtctttctcgcatgagccaacactccttcgtcaagacatcaagcaggcacgccaatccagaaccatagtcggttcctggcaagttgcgcggtggtgtgttccttcacaccgccggtcgcggatgtatcacggcgcgcaggcgctcctcttcgagaaacttcatgatgatcggcgccacggcttcggcccgggtgatcaggaacaggtggccgtcatcgatgatgtgcaactgtgcattggggatgcgccaggcgagcaggcgcatgttgaccagcgggatcagcgggtcatcgtcgccggccagcaccagggtgggctggcggatcttgtgcagccagtgaatgctggtccagcccaacccggcaaacaactgccagtagtaacccagcttgccggccgagcgcactttgctggcgtgttcggcggccagtttggaatcacggcggaacgagccgccataaatcatcggcgcaatgcgcaccacatgggacggttggatataacgcctggggcttgccatcagccacaagactttcggtttgcccggcaccatgaaggcaccggctgcggtggctgccaggatcaatttcttgcagcgctcggggtagtcataggcgaactgctgggccagcgcgccgccccaggacacgcccacggcgttcacttggccgtagtccaggtagtcgagcatgcgtgcggtgagcttggccaggccggggaaacggtagggccggttcggcgtcgaggaaccgcccacgccgggcacgtcgaaggcgatcacttccaggtccgggtccagggcctggacgaacggaaacaccagctcaaggttggcgccgatgccgttgaagatcagcaggggcgtcaagtgcggcttgcccggacgcaccgccgtgcggatggtctggccatccaggtcgatggtacggaagatgaacggttgcggcatgctcaagccctgtgaagtggtgctattggtctgtaggaactcggtcagtgtgggagctggcttgcctgcgatggcattctttcaggccgcgattagtgagcaggcccattgctatcgcaggcaagccagctcccacatctgatctcatttcaatcacaagaatgcctagcgttcatgtacataggtacccggcgccgcttcggcggcggcataggttttattgcctaatgtcgtcggggcttttttcagtttccccgcccgttccgcctgccacacctgccaatgcagccaccacgaatcggtgtgcttggtcgcatcttcctgccactccagcgcactgccggccaagccctcgctggtctggtaacgcgccttggggttgcccggcgggttgaggatgctctggatatgcccactgctggacagcacaaactcgaccttgccaccgaacaactgcgctgacttgtagcaggactgccacggcgtgatgtggtcgttggtgccggccagggaatagatatcggcggtgacctgcttgaggtcgataggcgtgccgcacacttccagagcgttggggcgtaccagtgggttgtttttgaacagttcgatcaggtcgccatggaacgccgccggcaagcgggtggtgtcgttgttccagaacaggatgtcgaataccggcggctcgttgcccagcaggtagttgttgacccaatagttccagatcaggtcgttggggcgcatccaggcaaagaccttggccatgtcacggccttccagcacgccggcctggtaagagtggcgcttggccgcttccaacgtctgttcatccacaaacagcgccacctgggtgtccaaggtggtatccagcacgctcaccagcagggtcagggcgttgaccttcttctgccccagcgccgcgtagtggcccaacagcgcggtgcaggtgatgccgccggagcaggcgccgagcatattcacgtctttgctgccggtaatctccgtgaccacctcgaccgcttccttcagcgcctcgatataggtggacagcccccattcgcgctgtgccttggtggggttgcgccaactgacgataaaggtctgctggccattgcgcaggcagaagcgcgccaggcttttatccgggcacaggtcgaagacgtagaacttgttgatctgcggcggcaccaccagcagcgggcgttcgtgtacctgttcggtaatgggcttgtactggatcagctccagcacatcgttgcgaaacaccaccgcgccttcgctggtgcccagggtcttgccgacttcgaaggcgcccatgttgacctggctgggcatgccgccgttatgcaccatgtccttggccaggtgggacaggccgtcgagcaggcttttaccgccggtttcaaagaagcgtttgaccgccgccgggttggccgcgctgttggtgggggccatggcttcggtcatcaggttgatcacgaagtggccgcggctgatgtcttgtgccgacaggttgctgtcgtcgatccagtcgtgaagttccttgcgccacgccaggtaagtctgcaaataacgtttgtagagcgggttctggctccaggccgggtcgttgaagcgacggtcgtcgccctcgggcaccagtgcggattttccgaacatcacattcttcaattcaacgccaaagtgggcgacgtgcttgacgctgtgcaacggttgcttgatggcttgggtcagcaccatcttggccgaggccaataagtcctttttgcgtaacgcgatgatcgggttcaaccccagggtgttttccgaggcctggcgtttcaagtcatcgttattcttgttactcatctacgacgctccattgtccgaaagacgagtaccggcgattgctgcgcacccaatttcgatacacgacaccagcctggtactgcgactcgggtgaccgttgataccgcatcgtcaaatgcagggaacttgccagctccattggttacccgagtttattttttttcgcaagcgggccaatcgttggccacgcgacagggcattcaagcagatgaaattagaaaatgcgctctaaacagcaagacccttgggctagagcatcagccgcacgaccgactcactcggatcgcgggtttttccagcggctttgagctcggccaggtagtcggcccacaaagcctcctgacgtacggccaattgatagaggtagtcccaggtgaacagtccgctgtcatgaccgtcgtcgaaggtcaatttcagtgcgtactggccggccggttccagcttgatcaaccggacgttgagcttgccgaattgcaggatgggtttgccgtggccctggacctcggcggaaggtgagtgcacccgcaggaattcggcgggcaactggtaggtttcatccggcccgtaggtcaggccgagggtgttggaggttttgtgcaggtttactgcggtaggaaatttcgacattggagataaccctgtaggaaccggctcaaaatgtgagagggaccaatgtgggagctgggcttgcccgcgatgcaggcacctcggtgtttcaggaacactgaggtgatgctatcgcaggcaagccagctcccacacaagccactctcacattgagtgaggcttacaggatataacgagacaagtcttcgttctgcgccaattcgcccaagtggctgttcacatactcggcatcgatcttgatcgcttcgccattctgcgcaccggccatgtcgccggcgctgaaggacacttcctccagcaggcgctcaagcaaggtatgcaggcgacgggcaccgatgttctcggtcttctcgttgacctgccaggcgatctccgccaggcgcttgatcccgtctgcctggaattcgatacccagcccttcggttttcagcaactcgcggtactgctcggtgagcgaggcatgcggctcgctgaggatgcgctcgaagtcgcccggcgtcagcgccttgagctccacccgaatcggcaaacggccttgcagctcgggcaccaggtcgctgggcttgctcaggtggaaagcaccggaggcgataaacaggatgtggtcagtcttgaccatgcccagcttggtgttgaccgtgcagccctcgatcagcggcagcaaatcgcgctgcacgccttcgcgggacacatccacgccgccggagttgccgcgcttggccactttgtcgatctcgtcgataaacacgatgccatgttgctcgaccgcttccagggccttggccttgagttcttcctcattgaccaggcgcccggcttcttcgtcgcgcaccagcttgagcgcctctttcaccttgagcttgcggcttttcttcttgcccttgcccatgttggcgaacaggttctgcagctggctggtcatttcttccatgccaggcggggcagaaatatccacgccggacacttcagccacttcgatctcgatttccttgtcatccagctggccttcacgcaggcgcttgcggaacagctggcgagtgttggaatcggtagccggtgcggcgtcttcgttgaaacccatgcgtgccggtggcaaaagggcgtcgaggatgcgctcttcagcggcgtcttcggcgcggtggctgaccttggttacttcctgttcgcgcagcatcttcagggcggcgtcagccaggtcacgaatgatcgactcgacatcgcggcccacatagccgacttcggtgaacttggtcgcttcgaccttgatgaacggtgcattggccagtttggccaggcgccgggcgatctcggttttacccacgccggtggggccgatcatcaggatgttcttgggcgttacttcaacgcgcagttcttccggcagttgcatccggcgccagcggttacgcagcgcaatggcaacggcgcgcttggcatcgtcctggccgatgatatggcgattgagttcatggacgatttcgcggggagtcatggacatagtgtttggcggcctcaagcctgaataagcccagggcttactcggcgaggtcctgctcctcaatggtctggttgtggttggtgaacacgcagatatcgccagcgatacccagggcggtctcgacgatttcacgggccgacaggtcggttttcttcaacagcgcgctggccgcagcctgggcgtagccgccgccggaacccatggcgatcaggccatgctcgggttcaaccacgtcgccgttgccagtgatgatcagggaagcgtctttgttcgcaaccgcgagcatggcctccaggcggctgagggagcggtcggtgcgccattctttggctagttccacagcggcgcgcaccaggtgaccctggtgtttctcaagctggccttcgaaacgctcgaacagggtaaaggcgtcggcggttgcgcctgcgaagccggcaagcacctggccgtggtacaggcggcgcactttcttggcgttgcctttcatcacggtgttgcccagggaaacctggccgtcgccgcccatgacaactttgccgtggcgacgtactgaaacgatggtggtcaaggggagagtctccacgcagcggggcgaaaatgccctgatggaaactcatatgggggtggcgagggggatttcaaccgtaggaaggcagggcggacgagtggtgatcgttcccacgctccgcgtggtaatgccgccttgggcgctctgcgcctgctctgtgacgcaaagcgtcaaggggcacgttcccacgcggagcgtgggaacgatcagtgggtatgcgtcagcggctctggcgttgttgtaacaacaggttgctaaaccctgcgccggccaattgcttttgcgccacggtcagctgttcacggttgctgaacggccccaccaatacgcgataccaggtcgcgtccttcaccgtgccagactccaccgataccgactggcccaacagaatgatctgtgcgcgtacacggtccgcatccgcctgtttcgggaacgaacccgcttgcaggaagaacttggtcaccggcgcagccttggtggctgccacgggcggtgctggcggcggcgtgatgccggccagcgcggcctgggcgcgcgcggtgtcgattttcgccgcttctgctggggttaccggcgtggtcggcacctgtggcgtcggcagggttttttccggcacggcgtcaggcggcacgatcacttccgactccggcagcagcgtgtagaagtcgtacttgggctttaccggtgcagtcgggctcggcgcggtcttgttggcttcggcgattttcgtggccttttgctgctcctgtttgacgcgcttgacgtcatcgccctggccgggctccagcttcatcagaaacacgataaatgcgccgaccgtaaggccgatggccatccacagccaacccggaatcggttgcttcgccggggcctggtagcggctggcgccgcgcttgggtgcaggttttttcttggcagccaacttacatacgctccagagtttccaggcccaagagttccaggccttgcttgagggtgcgtccagccaatgcggcaaggcgcaggcgactttgtttctgggcttcgtcgtcggcggtcaggatcgggcagttctcgtagaaactggagaacaggccggccacttcgtacaaataggtgcacaggatgtgcggcgtgcctttttcgccaacgctgttgagcacttcgccaaattgcgcgagcttggccgccagttcctgttcatgggcggcgtccagcgcgatctggccttggacttcgctgaagtccttgcccagtttgcggaataccccggccacgcgggtgtaggcgtacagcaggtacggtgcggtgttgccttcgaaattgagcatcaggtcgaagttgaagctgtagtcgctggtgcggtgcttggacaggtcggcgtatttcaccgcgccaatgcccaccacgcgggcaatgttgcgcaggtcggcctcggccagctccgggttcttttccttcaccaggttgtaggcacgctcctgggcttcggtcagcaggtcgatcagcttcacggtgccgccgtcgcgggtcttgaaggggcggccatcggcgccgttcatggtgccaaagcccatgtgctccatgtgcatcgggtgggtgacgaaaccagcgcggcgcgccacttcgaacacctgctggaagtgcagggcctggcgctggtcgacgaagtacagcgcacggtcagccttgagcacgccactgcggtaacgcacggcggccaggtcagtggtggcgtagaggtagccgccatcggccttgacgatgatcaccggcagcggctcgccgtcggcggtcttgaattcttcgaggaacacgcactgggcgccgttgctctcgaccagcaggcccttggccttgaggtcgttgaccacgttgatcaggtcgtcgttataggcgctttcgcccatcacgtcggccatggtcagtttcacgttgagcagctcgtagatttcctggcagtgggacagggaaatttcacggaagcggttccacagcgccaggcactcttcgtcgccggcttgcagcttgaccaccaggccccgggcgcggtcggcaaactcttcagactcgtcgaaccgctttttggcggcacggtagaagttttccaggtcggccagttcgttgctggtgatcgggttttcttgcaggtaggccatcagcatgccgaactgggtaccccagtcgcccacgtggttctggcggatcacggtgtcgccgagaaactccagcacccgtgccacgccgtcgccaatgatggtggagcgcaggtggcccacgtgcatttccttggccaggttcggcgccgaaaggtcaatgaccacgcgctggctgtcgccggccttgcgagcaccgatgcgggcatcggccagggcggcatccaggcgcaacgccagggcctgggtgttctggaagaagttgataaaaccagggccggcgatttcggccttggtgacactggcgtcagccggcagggctgcgatgattttttcggccaggtcgcgctgtttcatgccggcgggcttggacagcatcatcgcgatgttgctggcgaagtcgccatgggtcttgtcgcgggtgttctccacctggatcgccggcgacaggccttcaggcaacacaccttcgttgacgagttgggtgagggcttgttggatcagctggcgaatggtgtctttcatggtgttctctttcgaccgcaagcggcggcgcgcgatgcgcaggtggaaaaactgggcattatccgtggcgagggcgggcttgccaaccgttcagactatatggcggacctgcgggcctcttcgcgggcaagcccgctcccacatttaagggtattcacatttcataatgtgggagctggcttgcctgcgatgacgtaattaccctcaatacaaatctaccgggtctacatccaacgaccatcgcacctgccggccgctgggcagttgctccagctcaagcatccagcgatttaatagccgatgcagcggcgcgcgcgaggttgcctgcaagagtagctgagcgcgataacgtccggcgcgccgctccatgggcgctggcaccgggccgagtaattcgatgccgctgagggccaactcgcccaataaacgttcggcggcgctacaggcttcatcaagaaagccttcagcctgaccgggcttgtgggcctcggcacgcagcagcgccaggtgcgcaaagggcggcaggccagcggcgcggcgttcgctcaaggcctgttcggcgaaggcaaagtagccctgttccgtcagttgaatcagcagcgggtggtcggccaggtgcgtctggataatcacccggcctggctcttcggcccgcccggcgcgccccgccacctgcacgatcaactgcgccatgcgttcgctggcgcgaaaatcgccggagaacagcccgccatcggcattcaggatcgacacgagggtcacccgtgggaagtgatgccctttggcaagcatctgcgtgcccaccaggatgcacggttggcccttgtggatggtggtgaacagttggttcatggcgtctttgcgcgacgtgctgtcgcggtcgacccgcagcaccgggtaatccgggaacagaatgcccaggcgttcttcggcgcgctcggtgccggcgcccacgggccgcaggtccaccttgccgcactgcgggcaatggcgcggtacccgttccacatggccgcagtgatggcagcgcaactcgccgtggcgctggtgcacggtcatgcgcgcatcgcagcgctcgcacccagacatccagccgcagtcatggcacagcagcgttggggcaaagccgcggcggttgagaaacaccaatacctgctggccggcggcgagggtctggccgatcgcctgttgcatcgggccggaaatcccgctgtccagcgggcggcttttcacgtccaggcgcaggaagcgcggttgtttggcgccaccggcgcgctcgttcaagcgcagcagcccgtaacggccggtgtaggcgttatgcaggctttccagggaaggcgttgccgagcccagcacaatcgggatgtcttcctggcgggcgcgcaccagcgcgaggtcgcgggcgtggtagcgcaaaccttcctgctgtttataggagccatcgtgctcctcgtcgacgatgatcagcccggggtttttcatcggcgtgaacagtgctgaacgcgtgccgataataatgtcggcctcgccgtcccgcgctgccagccacgactccaggcgttcacggtcattgactgccgagtgcaccagggcgatacgggcattgaagcgctgttcgaaacgcgccacggtctgcgggcccaggttgatctccgggatcagcaccagtgcctgcttgccggcctgcagggtctcgcggatcagttgcaaatagacttcggtcttgccactgccggtgacgccggccagcaggaacgcgtggaaactgtcgaaaccggcgcgaatcgcctcatacgcggcgcgttgctcggggttgagcggcaactccggctgggccagccaatgttcgtggcgcgggtccggggcgtgcttgcggatttccacctgcaccaggcctttggccagcagcaggtcgaggctgtctttgctcagcatcagcttgcttaatagctggtgggccacgccgtggggatgctgcgccaaggtggccagggcctcacgctggcgcggggcgcgagcgatgcgcgggtcgtcgaggcgggcgccgggcaccatcgaccagaaacgctcctggcgcgcttcggccagttcgccctggcgcagcagcacaggcagcgcccagctcaaggtatcgcccaggctgtgttggtaatactgcgcggtccacaggcacagcttgaacagtgcgggcggcagcggcggcgtggcgtcgagcaaggcaatcgccggcttgagcttttcggcaggcacttcgctgtggtcggtgacttccaccagaataccgatcagttccctgcgcccgaacggcacgcgcacgcgcatgcccggctgcaactgcgcacgcgacacgccgggcggggcccggtaatcgaacaggcggcgcaggggcgagggcagggctaggcgcaaaatggcgtcgggcacgcgaggagtctcatctatataggcaagcggtggcgcaggggcgcgagcctagcagaccgggggtgtcacgtctccagtactgggatcggatctccaggacggctcagccttctgtgggagctggcttgcctgcgaaagcgctggtgcagtaacaaatgcagtgactgacacaccgccttcgcgggcaagcccggctcccacattgacggcgcagtgccaggaatttctgatgaaagggagttttcggccattaccgtcgcttgcgcgattaaaaaggtctggtagaatccgcggcctaattacgtgcggtattcgacaatagtgtcgagtggcggcacgctagcctgaggaagtgccatgaaagccgatatccatccagcgtacgaaaccatcgtagttacctgcagctgcggcaacaagttcgaaactcgttcgaacctgtgcaagccactgggtactgacgtatgcaacgagtgccacccgttctacaccggtaagcagaaaactctggacaccggcggccgcgtacagcgcttcgcagatcgctttggtgctttcggcaagaagcctgctactccagcagagtaaggttcaagagccttatgggcttttacccgctgttgaaaaaggcgtcccttgtgggcgccttttttgtgcctgggatttggttggcgaccgcccaggcccaagcattctgccccgccccggcggccatcgcccgggtcgaggtgcagcgtgtggtggatggcgacacggtgcggctcaaggatggtcgcagcgtacgcatgatcggcctcaacgcgccggaaaccggcaagaagggtcgccctgacgagccatttgccgtcgccgcgcgccagcgcctgcaggcattggtcaaggccagtgatgggcgcgtcggcctggtgccggggcgcgaaggcaaagaccattacgggcgcaccctggctcacctctacggcgccaatggcgagaacctggaggcgcaactgctggccgagggcttggggtaccaagtgggcgtcgcgccgaatgtcgacctggttgcctgccagcaggcggccgaaaacagcgctcgccaggcacggctcggcctgtggcgccaatcgccggtgcaaagcgtggccaatctcaagcgctccgggtttgccctggtggctggtcgggtcagcaaggttgagcgcaatcgcggcggaatctggattgaactgcagggttcactggtattacgcattgcgcccgagttgatcagccaattcgatacggccatgctcaatggtctgcaaggccgcaccctggaggcgcgtggctgggtgcaggatcgcgcccgccgtggcagcctgaaaaaaggccaagcacgctggctgttgccaataaccgaccctggcatgctgaaatcggcgctttgaataaaaaattgtagacattttttatttcgattgtgaacagttgagcccttgtatcccgtggctcttggccaaaagtcgtagcccagggcccttgacacctgtgactgcccagtcttgtagggactttacgacacgcgtatcctcggcggtccgtcgaccaacagtaaaagcggaatgccgatatgtctgatttgaaaactgccgctctcgaataccatgccaatcctcgtccaggaaagctgagtgtagagctcaccaaagccactgccacagcccgcgacctgtcgctggcctacagccctggtgttgccgaacccgtacgtgaaatcgcccgtgacccagagctggcgtacaagtacaccggcaaaggcaacctggttgcagtgatttccgatggcaccgcgattcttggcctgggtaacctcggcccattggcttccaagccagtcatggaaggtaagggcgtgctgttcaagcgctttgccggcatcgacgttttcgacatcgaagtcgattccgaaagcccgcaggcgttcatcgacaccgtcaagcgcatttccatcacgttcggtggcatcaacctggaagacatcaaggcacctgagtgcttcgagattgaaaaggccctgatcgagcagtgcgacattccggtattccacgatgaccagcacggcaccgcgatcgttaccgcagccggcatgatcaacgccctggaaatcgctggcaaaaccctgggcgaggcgaaaatcgtctgcctgggcgccggtgccgcagccatttcctgcatgaagctgatcatcagcatgggcgccaagctggaaaacatctacatggtcgacagcaagggcgtgatccagtccgagcgtaccgacctgaaccagtacaaggcgatgttcgcccacccgtcctccaagcgcaccctggctgacgccctcgacggtgccgacgtgttcgttggcctgtccggcccgaacctgctgagcgctgaaggcctcaaatccatggcgccgaaccctatcgtgttcgcctgctccaacccggatccggaaatcgctcctgagctggcccacgccacccgcagcgacgtgatcatggccaccggccgttcggactacccgaaccaggtcaacaacgtattgggcttcccgttcatcttccgtggtgccctggacgttcgcgccaagcgcatcaacgaagaaatgaaagtggctgctgccaacgccctgcgtgagctggccaagctgccggtacctcaggacgtgtgcgacgcctacggtggcgccaagctggaattcggtcgtgagtacatcattcccaaaccaatggacaagcgcctgatcaccctgatctccgatgccgtggccaaggccgctatcgagaccggtgtggccaccctgccgtatccgaagaactacccgctgcaaagcgtggatgatgtgttcaacggctaagctgttgtagcgcacccacaaaaaagccccggctgagtgatcagtcggggcttttttgtgggtagcgagcgcctatggctgatcgttcccacgctccgcgtgggaatgcccacctggacgctccgcgtcggcttttaaggtcgtgacgcagagcgtcacaggatgcattcccacgcggagcgtgggaacgatcggccgatcagcgtgatcaggtcagaacaaatcgatcggcgcgccttcatccgccggcagcgggctgcccggcaccacaccgttgcccagttcgttgaccgacggcggcgtgtcttcactcttgaacagctcgaagtacgcattcggtgtgcttggggaggccgcgcggccactgatggggtcgatgcgcaggctaaggatgccttccggttccggctgggtgtgcagcggcttgtccttgagggctgcgcccatgtagctcatccagatcggcagggcgacagtgccaccgaattcgcggcggcccaggctttccggttggtcatagccggtccacacggtggtcacgtagtcgccgttgtaaccggagaaccaggcgtccttggattcgttggtagtaccggtcttgccggcgatatccgcacggcccagggccagtgcgcggcggccggtgcccttcttgatcacgtcttgcaggatgctgttgaggatataagtggtacggccatccacgatgcgctcggcaactgctggcgcttgcggttcagcgggtgcgccggcgtttgcggccgctggcgtgcctggcgtcggctcgatggtgataccgccgttgctcggtgctgcgagcccgtcggtggcggccacgccattgaccacatcgccgggtacccgtggtgggttggcggtgaacagggtgtcgccattgcggctttcgatcttatcgatcaggtacggcgcgatcttgtagccgccgttggcaaaggtgctccagccggtggcgatttccattggcgtgagggttgcggtacccagggccagggacaggttcggcggcaggtcagacttggcgaagccaaagcgcgtcatgtagtcgatggtcttgcctacgcccatcgcctgcagcaggcggatcgacaccaggttgcgcgacttgtacagcgcctcgcggatgcggatcgggccgaggaaggtgttggtgtcgttcttcgggcgccagaccttgtccaggtattcatcgacaaacacgattggtgcgtcgttgaccaggctggcggcggtgtagccgttgtccagcgcggcactgtagacaaacggcttgaagctggagcctggctggcgcttggcctgggtggcgcggttgtagttgctctgctcgaaggcaaaaccgccgaccagcgcgcggattgcaccgttctgcgggtccagggacaccagggcgccctgggcgagcggcacctggctgaatttgaggctgtcatccttctggcgttgcacgcggatcaaatcgcccacctgggccacgtcggagggctgcttgggcatcgggcccatgctgttggtgttcaggaacgggcgtgcccacttcatgctgtcccaggctacatgggcttcgccagagcgggtcagcacttggatgccgtctttcgatacctgggtaacgatggccgggtccaggccgctgatcgaacgctgtttgcccaattcggtggtccaggcactcagggtcttgcccggcaggcgcgactcggggccgcggtagccgtgacgctggtcataagtgatcaggccttcatgtaccgaatggttggcgatttcctgcaaattgctcggcaccgtcgtggtcacgcggaaaccttcggtgtaggcctcgctgccataacggccgaccatctcggcgcgggccatttcagcgatatagggtgcattcacttccggcgtcggcacgtgatagctggcattcagcggttcggccacggcgctttcataagcggcctggtcgatcttgcccagcttgtacatgcggcccaggatccagtcgcggcgttctttactgcgcgccgggttggccagcgggttgaagcgcgacggcgccttgggcaggccagcaatcattgccatttgcgccaggctggcgtcacgaattgacttgccgtagtagacctgcgacgcggcctcaatgccgtaggcgcggttgcccaggtaaatcttgttgacgtacagctcgaggatttcatccttggtcagctggcgttcgatctgcagcgccagcaggatttcggtggccttgcgggaaaagctgcgctcgctggtaaggaagaagttcttcgccacctgcatggtgatggtgctgccgccggattgaatgtgtccgctttttaccaattgcgtggctgcgcgcaccaggctgctgggatctacgccgtagtggttggcgaaattatcgtcttcggcggacagcaatgcgctgatgaaattgggcggaatgtcggcaaaacggatcggtgtgcggcgcatttcgccgaactccgcgatcagtttttcatcgctgctgtagacccgcaaaggaatctgcaactggatacttctgagggcctctacggagggcaaacccggactaaggtagaggtaggccccgctgaatacgagcatcagcccgcagacgatggcgacaatggagtacccgaaaaacttcagcagacgaatcaaggcttttggatttccagagaaaagaaagagttacgcgtcggggcatgcatggcaaacgatggatcgacccgggcagcagataaaaagcgggaaaaaacgctgggcattaaagcatttttcggcttggggcgtcattcgcgagccttgaacaagccgaccgaatgcaaggtgcctggcagcaatcaggcgagatgacagccggtatgacagggaaagttttggggagttttatgggaaagggatatttcaggcgaaaagtcgacacggtgttgggggtcgatatcaatgacagcggtatcaagttgatcgaactgggccgttcatccggcggtttcagcgtccagggctacgtcacgcaagttttgccgccccacgcggtggtcgatggcaccctgctggaccttgaaaccgtggggcgggtgctgcaacaggcgcggtcgagattggggtcctcggcccgatacgctgccgtggcggttgcaggcccgtcggtgattacccggctgattgacatggacgccggcctcagcgacgaggaaatggcctggaaggtccagatggaagccgaccagttcatcccttatccattggatgaagtggccatcgactttcaggttcaagggccatcggctcaaggcccgcagtgggtagaggtgatgctggcggcgtgcctgcgcgagcaggtcgaagcgcgcgaggcggttttggccctggcggggctggtgccgcgagtggtcgatgtagaagggtttgcattgcagcgcgcttgccttcaggattttgccagcttcacgccgggtcatagagtcgatggtgcacaatgggccttggatgcccaagggatgggagtggcttgcgggctggccctgaggagtttcgctggatgacacgaatcaatcttttgccttggcgccaggccctggcgcagcgcaggcgcaaatacctgttggtgctattgctggcgtttgcctgcgtggcgctcgcggcattgtggttggctgatcaagtgatcgaccaggcgatagaccggcaggtaagccgcaacagccgcctggaagagcacatcgccacccaggactcgcgcatcaagaccatcgacgatcttcaggagcgaagccagcaactggccgaacgcatgaaggtggtgcaggacctgcatgatgcccgctcttccggggctcgattgttcgagcaattggctcgtgcggtgcctgaaggtgtccatctgcatgaggtggtcgcaaacggcgacaccatcagcattcgcggcacagctgaaagcaaccaggatatcgcccgtttgatgcagcagctcaagccagcccagggctccagttcgacccgcctgcagcgcgtgcaggccgaaggtgcgcgcggtgaaagtgaattccagctgatggtgcgccagggggaatccagcgaggcgcaaccatgagcctgcccaggctcgatttttccatgctctctgacaacgctgctaaatggtccctgccgggcaaggtgctgctcggctgtgcgctggccggcgtggtgctggcgataggtgaagtttcgcatggggggccgcagcgggagcgattgcacgggcttgaggcgcgggagcaggcgctgcagcagcaactcacagaaaagaccggcttggccgccagccttgaactgcgcacccagcaggtgcggagcatggaagacaatgttgccagccttctcgggcaattgcccggcgagcccgaggtgccagccatgctggaagacctcgcccggctggcggctgcccatggggtgtgggttgaaggcatcagtgtgctggatgaaatacctcggcagctttatatcgaacaacccatgcagataagcgcctccggggcttaccacgacctggcgacgtttgtcggtgccttgggtgggttgcctcgggtagttaccgtgcaggacgttacgcttgggcatcagggcgccttgctgcgtctgaacatgctcgccaagacctatcgtggcaccctgcaaaacggcaaggcccgtcaggtactcgatcccgggccgccatttggctacgccccgtcgtccctgcgcgacccgttcaagccgcctgccttgcaagtagtccatgtgcctggccggcccgctcttgcaccggatttcacccggccacgggggctgttggagggtatgcgcctggaacagttcgaaatggtcggcacgctgtccaggggtatgcaggctttcgccttgctgcgcgctggagccagggtgtatcgactggcggtgggtgattacctggggccggatcatggccaggtcacggccatccaggacgcggctgtcgagctggtggagctgtttcccgatggacagggcgcttggttgcaacgcccgcgaacccttgtgctgaacgtcaactcataacggaatcaaacaatgaaaaggaccttctcgtccttcggtgtggcgctatggatagcgttcacggcaccgatggctgctgctgtgcccaatcgcctggacctgatccaactgccgccgcccgacagtgcctcgtcggtcagctatacaggcgccaaactgactctgaacttccaggaaatcgacctgcgcgcggtattgcagcaaatcgccgatgtcgccgggctcaacctggtgaccagtgatgaggtgcagggctcgatcactctgcggctcaaggatgtgccctgggaccaagcgctggacctggtgctgcaaaccaagggcttggacaagcgggtcaaggcgggcgtgttgctggtggcgcccgccgatgaattggccgctcgcgagctgttgatgctggagtcgcgcaagcagatggccgaactggcgcccttgcggcgggagctgctgcaggtcaattacgccaaggccgccgacctggccaagctgtttcagtcggtgaccggctttgagggcgccaccgatgagcgcggttcggtggcggtggatgaccgcaccaacaacatcattgcctaccagactggcgagcggctcgaagagctgcggcgcatcgtggcgcagttggatatcccggtacgccaggtcatgatcgaggcgcgaattgtggaggccaatgtcgactacgacaaaagcctgggtgtgcgctggggtgggcggctcacacgcggccacggcggcattgggggtattgccaagccgcaggaagacggcgccgagccgccgcaaaacccgcccagttcaccctttgtcgacttgggggcgctggccggaacctcgggcctggggatcgcctatatcaccgacaacctgttgctggaccttgagctgactgccatggaaaaaaccggcaacggtgagatcgtctcgcagcccaaggtcgtcacctccgacaaagagactgcacgcatcctcaagggcaccgagattccttaccaggaatccacctcccagggcgccacctcggtgtcgttcaaagaggcttcgctgtcgcttgaagtcacgccgcaaatcacccccgacgaccatgtgatcatggcggtcaaggtcaccaaggatgagcccgactacctgaaccgcctcaatgacgtgccgccgatcaagaaaaacgaggtcaacgccaaggttctggtcagggatggcgagaccatcgtcattggcggggttttctccaatacccaaagcaaagtggtagataaagtgccatttttgggcgatgtgccgtatcttggccgccttttccggcgcgatgtgctggcggagaaaaaatccgagctgctggtattcctgactccgcgtatcatgaataaccaggcgattgctgtgagtcgttgattctgtgcgaaatttgattcttgtagggccgatgggggctggaaaaagcaccatcggccgtttgctggccaaagagctgcgcctgccattcaaagattccgacaaggaaattgaattgcgcacgggtgccaatatcccatggatcttcgataaagaaggcgagctgggctttcgtgaccgcgagcaggcgatgattgccgagctgtgcggctgcgatggcgtggtattggcgaccggcggtggcgctgtcatgcgcgatgaaaaccgtcgggcgctgcatgccggtggtcgggtggtgtatttgcacgcgtccgtcgagcagcaggtgggccgtaccgcccgtgatcgcaatcgcccgttgctgcgcaccgccgacccggccaaaaccctgcgggacctgctggcgctgcgcgatccgctgtatcgggaaatcgccgatctggtggtagaaaccgatgagcggccacctcggatggtcgtactcgacatccttgagcgcctgcaacggttgccaccccgttaaagcctggcccgaaatgcgctattctcggcggcgcgccatcaccttgtaaggtatggcgtagagccaccaagcggtgtcgagatatcgacagtgccggtcgtcactccatcttcaacgcggggacacatgcagacacttaaggtcgatctaggcgagcgcagctacccgatccacattggcgcaggtctgttggaccagcccgaactgcttgcgccgcatattgccggccggcaggtggcgatcatctccaacgaaacggttgcgccgctgtatcttgagcgtttgagccgcagcctggcggcgtactcggtgatctccgtggtgttgcctgacggcgaagcccacaaaaactgggaaaccctgcaactgatctttgatggcctgctgaccgcgcgccatgaccgtcgaaccaccgtggtcgccctgggcggcggtgtgattggcgatatggccggttttgctgcggcctgctaccagcgcggcgtggactttatccaggtgccgaccaccttgctgtcccaagtcgactcgtcggtgggtggcaagaccggtatcaaccacccgctgggcaagaacatggtcggcgcgttctatcagccccaagctgtgctgatcgacaccgctaccctcaacaccttgccgccgcgcgagttgtcggcgggcctggcggaagtcatcaagtacgggctgatctgcgatgagccgttcctgacctggctggaagagcacatggacgccttgcgcggcctcgaccaggtggcgctcaccgaagcgatttcccgctcctgcgcggccaaggcactggtggtcaatgccgacgagcgcgagtccggcgtgcgggccacgctgaacctgggccacaccttcggccatgcgatcgaaacgcacatgggctatggtgtgtggttgcatggggaagccgtagcggctggcacggtgatggcattggagatgtcgcagcgcctgggctggatcagcgcccaagagcgtgatcgcggcatccgcctgttccagcgcgccggtttgccggttgttccgcctgcggagatgaccgaggcggatttccttgaacatatggcgatagacaagaaagtgatcgacggtcgacttcgactggtactgctgcgccacatgggcgaagccgtggtgaccgacgattatccaaaagagattctacaggccacgctgggagcggattaccgcgccctggcccagctcaaaggttaataagacccgatgactagtttgcatgccgacgaggcgttcctcggccattaccacttgagccacgacccctttgctccacgggtgccgggtttcaaattcttccccgcccagcgcaaaccggtgcttgggcagttgcatcacctcgcgcgctacagccagttgctgctggtggtcaccggccctctgggcagcggcaagaccttgctgcgccaggcgctggtggccagcaccaacaaacaatcggtgcagagcgtggtggtatcggcccgcggtgccggtgatgcggccggcgtactgcgccaggtggcgcaggcgttggacgtctccaatgccgagccgaacgcgattctcaagcaagtggtgcagttgggcctgaccggccaggaagtctacctgctggtagacgatgccgagcagctcgacgagtccgccctcgaagcgctgctggcgctggcggcgggtacgccggaaggtcgcccgcatgtgttcctgttcggtgagtcgtcgctgatcgccgatctggagcagatcagtggtgagcaggagctgttccacgtcatcgagttgcagccgtacgaagaggaagaaacccgcgaatacctggcacagcgccttgaaggcgccggggcgggtatcgaacttttcaccgctgcgcagatctctgatattcacgaaagctccgatggctggcctggaaacatcaaccaggttgcccgcgatgccatgatcgaagccatgattgccagccgctctgcggtcaagcgtccaaagatggggttcactatgcctaagaagcacgtattggctatttccgccgttgttgtggtcgctgttgccgccgcctggttgatcccgggccgtaacaaagcaccgacaaccaccggcgcgccaaccgaacaggcgcagttgccactgggcaagcccacgccaaacgtcgaatttgccaactccggccaaccgaccaacctgccgatggtcggccaacctgtgatgcgcggcccgctggccgaagaagctggcggcatctccgaaggtgacgatggcgtgccggtggaaggctccagcgctacgccgccgaccgtgaccaccaccgcaccacctgcaggcgtaccggccggtgtgccagcgacgccggttgctccggtcgccaagccagctccgactccggcgccgaccgttgccaccgccaagcctgctccggtgaccaagcctgttgcaccggcgccagccgccaaaccagccccggctgccaagcctgcggaaaaaccagccgccaccgttgccaaggccggcgctgctggcagcagctggtacagcagccagcctaccggcaactttgtggtacagatcctcggcaccagctccgaagccaacgctcaggcgttcgtcaaagagcagggcggccagtaccgttatttcaagaaagtgctcaacggcaagcctctctacgtgatcacctacggcagcttcccaagccgcgccgcagccgattctgccatcaaagccttgccagcgaaggttcaggctggtaaaccttggcctcgcactgttgccagcgttcaacaagaactggcagcaactcgctgaagatccggcggccttacccaggccgccctcccggcacctcaaaaaaatccgcaagtgcgtgctgcccttacaggccgcgcgctttgtggtgtctgcgccacagtagcttttgagtcgtagcggtcagaattaaaaaagttttgactagcacagcatatcgctttaaacctttcataaatgcgacatagatttgcgacatttcgtcgctaaatttgtgagcgtctgtgtcggtgtgtacaatgacctcccttttgcccccgctaagccggcgtacgttcggcgtggaaggtaaccggttgaattgaaaagaaatttgcctcggtaaaagaggcagcctggtgagaaagtgtctatgaaagcaggtctgtaccaacccgatgaattcaaggataactgcggtttcggcctgatagcccacatgcagggcgaacccagtcatacccttttgcaaacggccatcgaggccctgacctgcatgacccaccgcggtgggatcaacgccgacggcaagaccggtgacggctgtggcttgctgattcaaaagcccgaccagttcctgcgcgctgtcgctaaagagcaatttgcggttgaactgcccaagcagtacgccgtgggtatggtgtttttcaaccaggacccggtaaaagccgaagccgctcgcgagaacatgaaccgcgagatcgccgccgccggcctgcagatcgtcggctggcgcaaagtgcccatcgacaccagcgtgctcggccgcctggccctggagcgcctgccgcagatcgaacaagtgttcatcgcaggcgatggcctgagcgaccaggacatggcgatcaagctgttcacgtcccgtcgtcgttcgtcggtgctcaacgccgccgacaccgaccactacatctgcagcttttcccacaagaccatcatttataaaggcctgatgatgccggcggacctcaccgccttctatccagacctgagcgatgagcgcctgcaaaccgcgatctgcgtgttccaccagcgcttctccaccaacaccttgccgaaatggccgctggcccagccattccgcttcctcgcccacaacggcgagatcaataccatcaccggcaaccgcaactgggcccaggcccggcgcaccaagttcgccaacgacttgatggacctcgaagagctcggcccgctggtcaaccgcgtgggttccgactcctccagcatggacaacatgcttgagctgatggttaccggcggcatcgacctgttccgtggcgtgcgcatgatcattccgcctgcgtggcagaacgtcgagactatggacccggacctgcgtgcgttctacgagtacaactcgatgcacatggagccgtgggacgggccggccggcgtggtcatgaccgacggccgctacgcggtgtgcctgctcgaccgtaacggcctgcgcccggcgcgttgggtgaccaccaccaacggtttcatcaccctcgcctcggaaatcggcgtgtgggactacaagccggaagacgtgatcgccaaaggccgtgtcggccctggccagatcctggccgtggacaccgaaaccgggcagatcctcgacaccgacgccatcgacaaccgtttgaagtcgcgtcacccgtacaagcaatggctgcgcaagaacgccctgcgcatccaggcgaccatggaagacaacgaccacggttcggctttctatgacgtcgaccagctcaagcaatacatgaagatgtaccaggtcacgttcgaggagcgcgaccaggtgctgcgccccctcggtgagcaaggctacgaagccgtcggctccatgggcgacgacacgccaatggccgtgctgtcccagcgcgtgcgcacgccgtacgattatttccgccagcagttcgctcaggtgaccaacccaccgatcgacccgctgcgtgaagccatcgtgatgtccctggaagtgtgcctcggcgccgagcgcaacatcttccaggaatcgcctgagcatgcctcgcgcgtgatcctcagctcgccggtcatttccccggccaagtggcgttcgctgatgaccctggagcgtccaggcttcgaccgccagatcatcgacctgaactacgacgagagcctgggccttgaagccgcggtgcgtaacgttgctgaccaggctgaagaagctgtgcgggccggtcgtacccagatcgtactcaccgaccgccacatcgcgccgggcaagttgccgatccacgcatccctggcgaccggtgcggtgcaccaccgcttgaccgaaaaaggcctgcgttgcgactccaacatcctcgtggaaaccgccaccgcccgcgacccgcatcactttgcggtgctgatcggtttcggcgcttcggcggtgtacccgttcctcgcgtatgaagtgctgggtgacctgatccgtaccggtgaagtgctgggcgacctctatgaggtgttcaagaactaccgcaagggcatcaccaagggcctgctgaagatcctgtcgaagatgggcatctccaccgtcacctcgtaccgcggcgcgcagttgttcgaagccatcggcttgtccgaagaagtctgcgagctgagtttccgtggcgtgccgagccgcatcaagggcgcgcgtttcgtcgacatcgaagccgaacagaaagccctggccgccgaagcctggagcgcgcgcaagccgattcagcaaggtggcctgctcaagttcgtgcacggtggtgaataccacgcctacaacccggacgtggtcaacaccctgcaagccgctgtgcagcagggcgactacgccaagttcaaggaatacacgagcctggtggataaccgcccggtgtcgatgatccgcgacctgttcaaggtgaagaccctggacacgccgatggacatcagccaggtcgagccgctggagtcgatcctcaagcgcttcgactccgccggtatttccctgggcgccttgtcgccggaagctcacgaggccctggccgaagccatgaaccgcctgggtgcgcgttccaactccggcgaaggcggcgaagacccggcgcgctatggcacgctcaaaagctcgaaaatcaagcaggtggccaccggccgtttcggcgtgaccccggagtacctggtgaatgccgaggtgctgcagatcaaggtggcccaaggcgccaagccgggtgagggtggtcaactgccaggcggcaaggtcaacggcctgatcgccaagctgcgttacgccgtaccgggcgtgacccttatttcgccaccgccgcaccacgacatctactcgattgaagacttgtcgcagctgatcttcgacctcaaacaagtcaacccgcaggccctggtctcggtgaaactggtggcagaagccggcgtcggcaccatcgccgccggtgtggccaaggcctatgccgacctgatcaccatctccggctacgatggcggcaccggcgcttcgccgctgacctcgatcaagtacgccggtgcaccgtgggaactcggcctggccgaaacccaccagaccctgcgcggcaacgatctgcgcggcaaggtgcgagtacagaccgacggcggcctgaaaaccggcctcgatgtgatcaaggccgcgatcctcggcgccgaaagcttcggcttcggcactgcgcccatgatcgccctgggctgcaaatacctgcgtatctgccacctgaacaactgcgctaccggcgtagcgactcagaacgaaaaactgcgcaaggatcactacatcggcaccgtcgacatggtggtgaatttcttcacctacgtcgccgaagaaacccgtgagtggctggccaagctgggcgtacgttcgctggaagagctgatcggtcgcaccgacctgttggacatcctcgaaggccagaccgccaagcaacaacatctggacctcacgccgctgttgggcagcgatcacatcccggcagacaagccacaattctgccaggtggaccgcaacccaccgttcgacaaaggcctgctggccgagaaaatggtcgaaatggccggctcctcgatcaacgacgccagcggtggcgaattcgcgctggatatctgcaactgcgaccgttccatcggcgcacgcatctccggcgaaatcgcgcgcaagcacggcaaccagggcatggcgaaagcgccgattaccttccgcttcaagggcactgcgggccagagcttcggcgtgtggaacgccggtggcctgcacatgtacctggaaggcgacgccaacgactacgtgggcaagggcatgaccggcggcaagctggtcatcgtcccgccggctggcagcgtgtacaagacccaggacagtgccatcatcggcaacacctgcttgtacggcgccaccggtggcaagctgtttgccgcaggtactgccggtgagcgtttcgccgtgcgtaactccggtgcccacaccgtggtggaaggcactggcgatcactgctgcgagtacatgaccggaggctttgtcgcagtactgggcaagaccggttacaacttcggttcgggcatgaccggcggtttcgcctacgtgctcgaccaggacaacaccttcgtcgacaaggtcaaccacgagttggtcgagatccagcgcatcagcggcgaagccatggaatcctaccggaaccacttgcagcacgtgctggacgagtacgtcgaggaaaccggcagcgaatggggtcgcaacctcgccgaaaacctcgatgattacctgcgtcgtttctggctggtcaagcccaaggctgccaacctgaaatcgttgctttccagcatccgtgccaacccgcagtgatatgcgtctgaacagtttgatgaggttttaacatggctgaacgtctgaataacgacttccagttcatcgatgtcgggcgcaaagatccgaagaagaaactgttgcgtcaacgcaagaaagagttcgtggagatctacgaacccttcaaaccccaacactcggccgaccaggcccaccgctgcctggggtgcggtaacccgtattgcgaatggaagtgcccggtgcacaacttcattcccaactggctcaaactggtggccgagggcaacatcctcgccgccgccgagttgtcgcaccagaccaacaccctgccggaagtctgcggccgggtgtgcccgcaagaccgcttgtgtgaaggggcctgcaccctcaacgacggtttcggcgcggtgaccatcggctcggtggagaagtacatcaccgatacggcgttcgccatgggctggcgcccggacatgtccaaggtcaagccgactggcaagcgcgtcgcgatcatcggcgcaggcccggcgggccttgggtgtgccgacgtgttggtgcgtggcggcgtgactccggtggtgttcgacaagaatccggaaatcggtggcctgctgaccttcggtattcctgaattcaagctggaaaaaactgtactgagccaccgtcgtgaagtgttcaccggcatgggtatcgagttccgtctcaataccgaaatcggcaaagacattaccatggagcaactgctcgccgaatacgatgcggtgttcatgggcatgggcacctacacctacatgaagggcggctttgccggtgaggacttgccaggcgtgtatgacgcgctcgacttcctgatcgccaacgtcaaccgcaacctgggctttgaaaagtcgccggaagatttcgtcgacatgaagggcaagaaggtcgtggtgctgggcggtggcgacaccgcgatggactgcaaccgcacctcgatccgccagggcgccaagtcggtgacctgtgcttatcgccgtgacgaagccaacatgcccggctcgcgcaaagaggtgaagaacgccaaggaagaaggcgtgaaattcctctacaaccgccagccgatcgctattgtcggtgaagaccgtgtggaaggtgtgaaggtggtcgagacccgtctcggcgaaccggatgcccgtgggcgtcgcagccccgagccgatcccgggttccgaagagatcatcccggccgacgccgtggtcatcgccttcggcttccgcccaagcccggcgccgtggtttgagcagttcgaaatccagaccgacagccagggccgcgttgtagccccggaacaaggccagtacaagcaccagaccagcaacccgaaaatcttcgccggtggcgacatggtgcgcgggtctgacctggtggtcaccgcgatcttcgaaggccgtaacgccgccgaaggcatcctggactacctgcaagtctgatgatcgttcccacgctccgcgtgggaatgccgccagggacgctccgcgtcccgaacagcatgacgcggagcgtcacaggaggcgttaccacgcggagcgtgggaacgatcctgcggcggcattgccgcgacaaattgacccgatagacaaaaggcacggtgcattccgtgccttttgcgtcgcgctctgagaaaatgcccgcactttttttgcggatgccgacatgactgccctcaagaacgaccgtttccttcgtgccctgctcaagcaacccgtagacgtcaccccggtgtggatgatgcgtcaagctggtcgctacctgccggaataccgcgccagtcgcgccaatgcgggcgatttcatgagcctgtgcatgaacccggagttcgcctgcgaagtcacgatgcagccgctggaccgctacccacaactggacgcggccatcctcttctccgatatcctcaccatccccgacgccatgggccaaggcctgtacttcgaaaccggcgaaggcccgcgtttcaagaaggtcgtcagcaccctggccgatatcgaagccctgccgatccctgatccacacaaagacctgggctacgtgatggacgccgtgagcaccatccgccgcgagctcaacggccgcgtgccgctgatcggcttctccggcagcccatggaccctggccacctacatggtcgaaggcggctcgtcgaaagacttccgcaagaccaaggccatgctctacgacaacccgcaagccatgcacctgttgctggacaagctggcgcagtcggtcacgtcctacctcaacggccagatcatggccggtgcgcaagcggtgcagatcttcgatacctggggcggcaacctgtcggcggcggcgtaccaggaattctccctggcctacatgcgcaagatcgtcagcggcctgatccgtgaacacgaaggccgcaaggtgccggtgatcatgttcaccaaaggcggcggcctgtggctggaaagcatcgccgacgcgggcgcggatgcactgggcctggattggacctgtgacctcggcgaagcgcgccgtcgcgtcggcaaccaggtggccctgcaaggcaacatggacccgaccgtgctgtacgccaagccagaagcgatccgcgccgaagtagggcgcatcctggctagctacggcaaaggcagtggccacgtgttcaaccttggccacggtatcaccccggaagtgaacccggagcacgcgggtgcgttcttgcgcgcagtgcacgaactgtcggcgcagtaccacgagtaaaacgcaaaacaaactgtgggagctggcttgcctgcgatggcggcggcgaattcaacaccgccatcgcaggcaagccagctcccacataaagccaatcgcgtcaggtctgcatattccccagtggcggcaacttcgccagcttcaacgccaccagcaacgcgccgatcagtagcgcgataatgaatccgccaatcccgttccacccggcaaaatgccagaagaaccctcccgccgtcccggcaatgctcgaccccacgtagtagcagaacaagtagagcgacgacgcctgccccttggctttcaccgcacggcggccgatccagctgctggcgaccgagtgggcgccgaagaacccgaaggtgaacaccagcatgcctggcaccaccagccacaacggggtgaacagtgtcagggcgatgccggcgagcatcagcacgatggtagcccacagcacccgacggcgaccgaggcggtcggccagggagccgatcttggccgagctgtagatgcccgacaggtacaccactgatagcaggccgaccaccgcctggctcagctcatagggtgaggccagcaggcgatagccgatgtagttgaacatcgtcacgaaggcgcccatcagcaggaaggcttcaaggaacagccacggtaggccggcgtccttgaagtgcatgacgaagccgtccaccaggctgcgcggcttgaggctgctggcgcggaagttgcgcgattcggggaggatcttccagaacaccgtggcagcgatcaacgccagggcaccgatgatcagcattgcggtgtgccaactgacgaagtcgatcaatacgccgatgatcaggcgcccgctcatgccgccaatcgcattgccgccgatatacaggcccatggccaggccgatgtgctgcgggtggatctcttcgctgaggtaggtcatggccacggcggccaggccgctcaaggacaggcccaccagtgcgcgcatcaacaggatgccctcccagctcggcatcaagccgctggcgatggtggccagcgccgcacagaacaacgcggcaaccatcaccggcttgcgccccagcctgtcggatatcggcccggtgatcagcaggccgcaggcgagcatcgcggtggcgacggacagaatcaggctgctttgcgccgcattgatggaaaattcatgggacagcgccggcatcatcggctgcacgcaatacaacaaggcaaacgtggcgaagccgccggagaacagcgccagcaccgtgcgcatgaacatcggcgtgcctttttcgatgtacgcgtcattaagctgcgccaccacctcatcgagggctgagggcggggtgtgttgggcaagtggagcaacagcaggattcacgggggacctcggggaggaaagtctgccaggactgacaatgcaaaaaagaatatagctggctaatgattctttccaatatattgttcgacctgtttgatagtttttacgacctaatgaggcttgcatggaattccgccatttgcgctacttcatcgccgttgccgaagaactgcacttcggccgcgccgcgcaggtgctgggcatctcgcagccacccctgagccagcagatccaggcgctggaacacgagctgggcgcacgcttgttcgagcgcaccaatcgtcgggtcgagctgagcgaggcagggcgcttgttcttgcaagaggcacgcttggtactggcccaggtcgacaaggcggcagatgtggcgcggcgtgcgcagttgggggaactgggtgaattgaagatcggcttcacctcgtctgcgccgttcaacgccagcattccccaggcgatctttgccttccgccaggcattcccggcggtgcatctgaacctgcaagaaatgagcagcacccaagtggccgagtcgctggtggacgagtcgattcaggttgggttgatgcggcctttgcccttgcccgactcactgaacgtgatcgagttgatgcgcgagccattagtcgcggtactgagcgccggccacccattggcccacggcagcgagcgcggcttgcacctggagcaattggccgaggagccttttgtgttcttcccgcgcagttacggcagcggcttgtacgcgcagttgctcaacctggcccgcgacgccgggttcagcccgcactttgcccaggaagcaggggaagcaatgaccatcatcggcctggtggcggcggggttgggggtgtcggtgttgccggcgtcttaccagcgcatccgcattgacggcgtggtctatcgcaccttgctcgacccgcaggcggtgacggcggtgtggctggtgcagcgtaagggcgcgcaaacgccgatggcgaaagggtttgtggagttgttgacgcgtaaggccgctcaataacctgtggcgcgggcgcaagctccctcgccacaggggggtcagttttggggcgaagtatttgcttcattcacgctgtaagtacgcagccccgccagaatatcccgatccagcatgctcacccaacggttgtagttgcgatggatcttgccgtccttgtagcccaggtcgcggctgtcgcggtaggtgatggcgtagctgttgcgggtgtagcggatgtcgatggcggcgtagaactggccgcgcacggtgatctcggcctgcaccagttgtgggctcaggcgttgtaccgtccactcgcgtttttgcagagcggcgacgatcacttgcttcattttttcttcgctgacctggcttgtggccggtaactcgtgctgggtgttgagcaccggtttgctggtgcagccagccgtggtcagcagggccagggtgatcagggtagcgcgtagcagggaagacattccgttttctccagtcgattaaaaagtcaggcccagcggcggaagatcaacgaggtgttgacgccgccgaaggcaaagttgttgttcatcacgtagtcgttgtgcatctggcgaaagccaccttgcaggtagtccagctcgccgcattgcgggtcgaccgcgtccaggttgaaggtgtgcacgtactggtcgcggttcatcatctcgatgctgaaccacgactccagcgccccgcacgcgcccagggtgtgccccaggaaactcttctgcgaactgatcggcatgcggctgccaaacaggctgctggtggccagggtttcagcaatgtcgccctggtcggtggcggtgccgtggccgttcacgtagccgatggcggacggttcaagacctgcgtcctccagggccagctccatggcgcggcgcatggttttctgttccgggcgggtggtgtgctggccgtcggcgttgctgccgaaaccgaccagttccgcgtgaatatgcgcgcctcgcgccaacgcgtgctccaattcttccagtaccaacatgccgccaccttcaccgatcaccaggccgtcgcggccgctgtcgtaggggcgcgggctggtttgcggcgcatcgtttttcaggctggtggcgtacaacgcatcgaacaccatggcttcggtggggcacagttcttccgcgccgcctgcgagcatcaacggcagacgcccgaacttgatcgcctcataggcgtagccaatgccctggctgccgctggtgcaggcgctggaggtgggaatcagccggccggtgaggccaaaaaagatgctgatattcgccgccgtggtgtgcggcatcatgcgcacataagagttggcattgagcccctcggccaccgagttgagcagcatattaccgaacgccttgatctcatcggtgctgccggtggacgaaccacaggccacgcccatgcgcccgtccttgatcgactcgtcaccgagcaagccggcgtcctgcaaggcctgctctgctgcccacaccgccaggcgcgagacgcggcccatgctgcgcagctgcttgcgcgtccagtgcgcgggcacgacgaaatcgtcgatagggccggccaggcgcgtgttcaactcggtgaaacggtcccactcatccatgcgccggatgccgctgcggttggcgcgaaagttcgcggcgatggtgtcccagtcgctgcccagggaggtcacgccggccatgccggtgacgacaacgcgcttcatcagcacaggcccccgttcacggccagcacctggcgcgtgatatagccggcttcggcggacatcaggaagttcacggcgccagcgacttcgtccggcgtgcccatgcgctgggccgggatcattttcatcagttcttctaccggtacgttttcatccagcatcgcggtgtcgatcaggcccggcgccacgcagttgacggtgatcttgcgcttgcccagctcgatggccagcgccttggctgcgccgatcaagccggctttggaggcgctgtagttgacctggccgcggttgccgatcagcccggacaccgaggtgatgcacacgatgcgcccggcggcgcggcggcgaatcatcggcatcatcaccgggtgcagcacgttgtagaaaccatccaggttggtgcgcatcaccacatcccaatcgtcttccgacagggcagggaaggcgccgtcgcgggtcaggccggcattgagcaccacgccgtaataggcgccatgctgctccacatcggcctcaaggatctctttgcatgcagcgcgatccgccacgtcgaactgcagcacgcgggccttgcgccccagggcttggacctcgagctgtaccgcgtcggcttcggcacggccgctgcggcaatgcagcacgatgtcatggccggcctgggccaggcgcagggcaatggcgcggccgatgccacggctggagccggtgaccagtacggattcagtcatggcgtttcgtccttcgattcagctaaatagttggccgcctggggcggtcgaaatacgttcaagcgcgcgctggcctggataccgtcgccggtgaggtggcattcgaacacgcccatgccgttgtcgtcttccagggagcgcaggccgtggatattcagctcgaggccggccggaaagtgctccacgttgcactcgaacttacgtgtgcccaacaggaaacccagctccacggccttgccttgctggcgcgcatggcaaccggcataggcggcgacgctttgcgccatcagctcgatgccgacccaggcgggcaggctgccgtcagcacggttgaacaggccgccgggcttgacggtgacgcgggtgcggatctgctcttcatcgaacgacagcacctggtcgatcaggatcatgtcgcccgcatggggcagcagttcggcaagtggccaatcgatcatggggcctctgcgattatcaggctgacattgttaccgccgaaggcaaacgagttgctcatcaggcagggttttttcaagctgtcgccgctgcgcgcccattgcaacgcgggcagcgccgggtcggggtggccgtcccatacgtggggtggcagcaggcgatgggtcaggctcagccagcagaacgcggcttccagtgccccggcagcgccgagggtgtggccggtcatgggcttggtcgatgagcaggcgacgccgcctggaaacaggctggcgaccgccaggctttccatggcgtcgttgtgttgggttgcggtgccgtgcaggttcaggtagccgatctgctcgggcgaaagctttgcactggccagggccttgcgcatggccagcaacgcgcccttgccgctgggctcgggcgcagagatatggtgcgcgtcgcaactggcgccgctgcccagcaaggcgatgggggccggctcgcggctcatcaggaacagcaccgccgcttcaccgatattgatgccgttgcggttcaccgagaacggattacagcgctccgcagacacggcttccagcgcggtaaacccgttcagcgtcagcttgcacaggctgtccacgccgccgcagatcaccgcatcgcacacccccaggtccaacaggcgctgggcgctcatcaatgcacgggcgctggaggtgcaggcggtggaaatcacataggccgggccgctcacgttcaaccagtcggcgaggaagttggccggggcgctgagttcctgttgctggtaatcgtagtcagcggggaactgcgtgttttgcaggtaatgggcaatgccacggctggcttcgtcaatgcccgacgtgctggtgccgagcacaaccccgacccggccagggccgtaggtctggatggcctgacgaatctcatccttgatctgcagcgccgcttccagcagcaactggttattgcggctgctttgctcggccagctctgggggcaggcttgccagctcgccctgtacggcggccaccggcactacgcgctccggcacccagccgctttcggcgcgcatgcctgagcaatcgccggcgaacaggttacggctgacctcggcctggccacggccaagggcacagatcacgccaagggcattgaggtaggcggtcatcggctcacacccagcggggtgatgcggtaactcagcggctggccggccatgttcacgctgaacacctcggaagactgatagatgatttgccagtggctcggcagcgtgcgcgtcaggtccatcgcctgagcgtgcggatacaacgcgggcacatcaccagccggggtcagggcaaacagcagcgcggcaaacaactcccgtgcctggggattgggcggcagcaacccgtcggcctgccactgcccatcaagcagtttttgccgggcctggggaatgcccagcgggtccatcatcgaccagcgaatcgcgcggccttcgcgctggatcaccagcagccagtcctggctctggccgtccgccaggcgctgcacatgcagttgcatcggcaaggccagggccggggttttttccggcaacggtgcctggctggcgcaggcgccgagcagcagcaggcaacttatcaacagcaggcgcatcatggggccgcattctccacaggtttacgcgctacgcagttgaccagggtttcctcgcgctggcccacgggtggtgccttgcgcaggccccagcgttccagcaggccgaagtcactggaacggctccaccacaagtaagggtacgaaatgttctgtgcagcgaactcaaagccctgctcgcgcagcatctccaagtactcttcggcgctcttttgcacatgcatcgggtggcggaacagccagcgaatcacccaggtgtcgatgtaggcttcggtggattcggcaaacagcagatagccgcccggcttgagcacccgatagaactccttgagtgcgcgatgttgttccaccagatgatggaaggtctggtggcagaacaggatatcgacgctggcatccggcacgttgagggtcgcgcagtcgctgccgatcagttcgacgtccagccccaggcgcgcagcttcttcgcggctcagtgccaggctgtgggggtcggcatccaggccgatcaggcgcgaaggtgcgaacacctgatgcagcaactggaaggatttgccctggccgcaaccagcatccaacaacaccggcgccaccggtagcggctcgctgaacaggctgcgcaggtcattgatcgccacgcgcaacacgtgatgctgccaggtatggctgcgcaggaaccagaaaccgaacttggtttcttcgacgtagttttgactcaggtagtttttttcaacgccagggctgctcataccgcttcactcgcacaaatatccgacaacatccgcaagcgccgcttcggctcgctgacaaacgggttgcgttcatcccaggcgtaaccggccaggattgagctgatcatgcggcgaatctccggtgaactgccaggatggaaaatcacgtcctggaacgtgcccgcataccagccttcgacgtagcaacggaaggtatcgacaccgcgcttgagcggctcggcaaactcggtttgccagtccaccgtttcgccgctcaattggcggtgcagcacacccgcggccatgctcgccgaacgcatggcaatggtcacgccggaagagaacaccgggtcgaggaattccgccgcgttgcccagcagcgcaaaacctgggccgtgcagggttttgacgttggccgcgtagccgccgatcgtgcgcgccggggtgtcccacacggcattttgcagcacgccggacaggcttggggtttgctcgataaagcagcgcaggcaggcgtcgaggtcgctgtcggcgccctcgaaatgctccttggccgcgaccacgcccaccgagcaacggccgttactgaacgggatggtccagaaccagatgtcgcgctgggtcgggtgagtggtcaccaggattttgctgcggtcaaagcctgggtgttcgatacggtcttcgacgtgggtgaatacggcctggcgcagcgggaaattcgacggtgcttccaggtccagcaggcgtggcaacacacggccatagccactggcatcgagcacgaacctggccttgaggtggtactcactgccattctggcggcgcacatgcaaataccggctctcggcagaaaaatccacgccgacaatggtttggccatagcggatttccacgccttgcagcgccgcctggtcggccagcaatttgtcgaactcgccgcgctgcacctggaaggtggtgggcttgccgttgctgaaggtgtcgctgaaatcaaaggcgctgtagcgctcgccccaggcgaaggccgcgccggttttgacctggaagcctgccgcttgcactgcgtcgagcatgccggcttcttcgataaaatcgatgcagtgtgacagcaggctttcgccaatcgagaagcgcgggaaatgctcgcgctcgatgatcaatacatcatgccctttgcgctttaacagcgcggccgcgatggcaccggaaggcccggcaccgatcaccaccacctggcgacgttccatttcaactgtgggcacgagggctccttgccgcatgggcgctaatcacattcataaggcgtgtttctgcctgccggcccagggcgccagcataaagctgaacgccaggcccaggctgaccgacaagccgaaattgctcacggccggtgtactggagaccgccagcaggccgaacgacaaccaggtcgtcagcgccgccagcagtgttcccaacaggctgacggcgggaccgccgatctgctcgcgcatcaaaatcgcatagtcaacgctgatggccgtgaccagcaacaggccaaacagactgaacagggtcagtggctggcccagccaaccgaggctggccaggctgcacaacgcggccagcagcggcagggcgacgatacgcaaggcgccgccaacgccgaagggcgcaatcagcaatagcacgatcagcacgcaagacagcaacttcaattcggcagcgctgatctgcgtgtcggcaaacacccggttcaagtcacccaggcgatccaccagctgcacgccgggcaagtccagcgcctgcacccgtagcaacgccgggttgttcaagccttgcaggctgaccatggccgccacgccgccgttcaccgggccgagccacagcgtccgccagggctcggccagcgggcctcgcagtgcggcgtcgatgtctgcggtgggcagcgcctgcaactgcgccacttcggcttgcagggcagtgaggggcacgccgaggtccagtagcggttgccagtatggcgccaggttgctcagcgcctcgcgcagctgttgttgctcatcggggaggttgaccagttgattgagcgccaaatagccctggagcttgtccatctgcaccaactgatccaagcgtttgcccagggcggcctggcgttccagcaactgctgctgattgtccgcccgcaccaggaaaaactggctggtgggctggaacccggtgatgcgcgccacggcctgggcttcctgtagcaactgcggcggcgcaccgatccattggcggatatcgtttttagtgttcagttgccacaggcctgcagtgcagaacagcagcacccacaccagcagtaccgaaccgggcacgtgtttgagcagggccgtgcgtagctgccataggctttgggcgacacgcagcggccattgcgccgggcgcagttccacgcccttgagcagcgcgggcaacaggcacacggcgcacaaataggcaccgaccaaaccggcagcggagaacaccgcaatctgtgtcagcgccgggaacggcgtccaggccagcgccaggtagccgatagcactggtggccaggctcaggctcagccccggcagggtcaggcgcaacgccggccaactgcgccacggctgcaggctccagcttttggacaggtaatgcagcgggtaatccaccgctacgccgatcaggctggaacccagcaccagggtcatcacatgcatatgcccaaacagcgccacgcacgccaccgcgccaaacagcatgcccaccagcaccggcacgaacgccagcaacacccgccagcgccggaacgccagcaacagcaataacaggatgcccaaggtggcgccgccgccgacccaggtcatttcccgagtggcctgttgttgcccgttggccgcatagagcaaaccgctggcagcgagcagttgcgcgccgtgtgcgccggcttgctcgcggctggccttcagcaagtccgccacttgcagtggcagtttcatatcgaaggcgttgccggtagtgcgcgcccgcagcagcacccaactcttgccgtcggcatcggcgatcaaggcgccgctgccgatgtccatttgcaccgcgccgtgttgcggttggctgttctggatgcgccctgtcaggccgagccaatcgtcctggctgggcaccaggctgaaacctgtgaaggggtcgaacagcgattgcacgcgttgctggatgaacgcctcaggctgttgggtcagttgttcgcggtccttggacgagagcatcgacaaacgcccacgcagcagttgctcgcgcaatgctggcaagtcggcttgcaggttccactgcaccttttcaaacaggccgctggcctgccagcgttcacccagttgctgcgccacggccaccgcttgctgacggtcggcatgccccaccagtaccagcatttcgcggttgagcggctcttgcatgcgttgttcggcttgcagctccagggcgtctggcgtgctgccgggcaccagctccatcaggttggccgacaacggcgcgccatcacgccactgccagccggccagggccagcacggccaccagcagggtcaggaacaggcgcggcagcaggcgttcactgggcaaagtcgtgttgctccgcatcgctcaacggctggtcggcggtactgtcctgcatgcgcagcagcgtgctgtcgccttgggtttccagcagttcaatgctgtgcaccagcgcgccgccgtcgatagtgatctgggtgaacacttgcttgagcagcagcgagcgtggggtcagcgtgagcttccactgttgggcctcaccttgcagttgcaggtcgaagtcgcgttgcaggccactgctgtcaccctgcagtaccgccaggaacaaacgattctgttcggcgccggcactcttgtttggcagcagttgccagccattggcgtcgcggcgggcaatgccttgagctgtaatgcggtagtcctgttgcagcggggttttcaacagccacagcaggccgtgatccttggcgagcacgaaggtgcctttgctcactagcggctggggcagggcgcgcaggtgtttttcctgggtgaagtggccgtggatcacggagggtttggcaagctgatcgctcaactgctgcaggtcgaaggcattcgccaagttgggaatgcataacaacaggatgagcaggaaccctgtgggagcgggcttacccgcgaaggacgttaacgataacgcgggttgcctgacactcagcagggctctcaggatcttcgcgggcaagcccgctcccacaggggtcagcatttcagggccttttctacggcgtcggtaaatatcttgggcgaggccagttgcatttcgcggctggcgatgtccaccgctacttgcacggtgctggcgcgggtcaagcgctcgccgctggcccggtcggtaatcaggtagttcaccttcaagcggttctcccattccaccaggctggcgcgcacgttgatcgtttgaccgaaggtcgcgccgcgcacatagcgtagctgcatgtcgatcaccggccacgcgtagccggcttcgagcatcgccgtgtagttatggccgatcttgtccagcaacgcacagcgcgccacttccaggtacttcacgtaatgcccgtgccacaccacgttcatggtgtcgatgtcgaaaaacggcacgaggatttcagtgtcgctgtgcaacacgcccgggctacgcatgcagcctccagtgttgcgcggcgatgcgttgcaggcacaggcgcagttcgccttccagggcgcggtcttcgatgaccggcgcaaagtcttgggccagctctgcatgcatcgcggccagcgccggcggcagtggccgggcatccccggcctgggcgcgcagccacacgccctggttggcggcgagcagggtcgcggcggccacctgttcggtcaactccagcacgcggatcgcatcgcgggcagcgatggtgcccatgctcaccttgtcctggttgtggcactcggtagagcgtgagaacacgctggccggcatggtgtttttcagcgcttcggcggtccaggcgctggtgccgatctgcacggccttgaagccatggttgatcatcgcgcgatcagccggggcgcccgacaggttgctcggcaggccatggttgtagcgcacatccaccaacagtgcgagctggcggtcgagcaggtcggcaacgttggcgaccagggtcttgaggctgtccatggcgaaggcgatatgcccgccgtagaagtgcccgccatgcagcacgcgttcttcttcggcgtcgatgatcgggttgtcgttggcgctgttcagttcgatctcgatgaacgagcgcagccagttcaggctgtccgccaatacgccgagcacgtggggcgcgcagcgcaacgaataacggtcttgcaggcgatgcaggggggcggtgggcgcgtcgatggccagatccttgcgcagccacgcggcgacttgcatctgcccagggtgtggtttggcggcgaacaggcgctcgtcgaagtgttcggggttgccttgcagggccaccacattgagcgcggtgatgcgcgtggccagttgcaacaggtagtcggcgcgggcaaaggccaggcaggccaggccagtcatcacggcggtgccgttcatcagtgccagggcttccttgggccgcaataccagcggctcccagcccagttcgcggtgtacgtcggccgccgggcggcgttcgccgcggaacagcacttcacgttcgccggacaaggtcgcggccacgtaggacagcggcgtcagatcaccgctggcgcccaccgagccttcttccgggatcagtggcaatacatcgttttcgaggaaggcatgcaggcgttccagcagctccacgcgaacacccgacatgccatggcacagcgactgcaaacgcgccgccaacacggcgcgggtggcttgggcgtcgagcaacttgcccaggccgcaaccgtgaaaggtgtacaggtgacgcggcaacgcttcgacgtgctccagcggcactgccaccacacaggagtcgccgtagccggtggtcacgccgtagatcacgccttccttgtccagcagcgagtcgaggaactgcgcacccttggcgatgcgttggcggtacgcggcatcgtcctgcaggcgagtgggcacctggcggttggccagggccagcacgtcttcgatgcgcagggggcgttcaccaaaggtgatgggctcaagaggcgtggtcatcggtcttccagaaagggtaaaagttgaaccattgttggggcgcttgcaggcagaactggcccaggcgtgcggcgtagcgggcggtccacagggcgataacctgctcgcgggtgctgcgcttccattcgatcaaatcggcaaagggctcgatggtcaggcgatagcgaccctggtgcttgaggcacatcagcagattgaccgggcacttgagtaagcccgccagcagccatgggccttgggggaatgccgccgtatggccgaggaagtccacgcgcaccgtgcgcccgccgtgcagcgggatacggtcgccggcaatcgccagccactcgccatcgtccaggcgctggctgagcagcagcatggtggccgggtccagttcgctgacctggatcaggcgtaaatgggtcgcgccagcctcgcccagcaggcggttgaaacgctcggcgtgcttggtgtgcaccagtacattcatggtgacctgctcaccgatctccgccagggcgcggcacacttccaggttgcccaggtgtgcgcccaccagcatttgcccgcgctcgccacgcagttggctgcgcaactgcgccgggtcattgatctcgatttgctccaggcgcagcttgccgttccacacgtcgagcttgtccagcagcgaatcggcaaaagccatgaactgggcaaagacggtgcggtggctcggcagcaggtcgtcgcgcccgctccactgcgccaggcgctgctggtattgccaggcgctgtggcgtgcggtgcggccgaacaggaagaagtaaaacacgatgctgtagagcaacgggctcaacaggcgacggccgaggacttttaccgcgaccgcggtgaacttcatcagccagaagctgccgcgttcttcgcggtcggcccagtgcttggtgctgtcgttcatgcttgccaccgtcgccacaggatcatcggcgcgcgcacgagcatgccgaagaacaaccgcgtgtgcatggcgctgatgcgtaggttgtcgcgcaacaagcgaaagtgcgacaggccgtcggcggggtagtacacctgggtgggcagccagcgcatgggctggttgcgccaggccaggcgcaccaggatgtccgagtcgaaatccatgtgcgtgccgatgtaggccgagtccatcagcgctagggtcggcgccagcgggtacacgcgaaagccgcacatcgagtcgcgaatctcaagcgacagggtgttgatccacacccaaacgtgggtcaggtaacgtgcgtacaggcgacccttgggcacgctgtcgtcgtattcggggtagccgcagatgacggcgtcggggtgctggcgtgaggtgtggataaaggtctcgacttcgcgcaggtcgtgctggccatcggcgtccacttgcagggcgtgggtgtagcccaggcgcgctgcctcgcggaaaccggccatcacggcgccgcccttgccctggttgctgggcagggtcagcagggtgacgttgtccagcctcgccaactgcgccagcacggctgcgcacgcggcgctgctgccatcgtcgaccaagaggcagggcaggccgcttttcagcacactgtggaccacggctggcacggcggcttcgtggttgtacaccgggattaaagcgcaggggttatgcatgcgcggcctccagcactatccgcccgcttgagcaggcagcaaccccattgcgataggcgaagtacagcttgctacgctcccgatcaaagcgcaggtgcagttcgatgtgatcgcccgggcgcaccagttgctggaacttgagcacttccatgccggcgaaccgggtgggcaggtcgagcaattgctggcccaggttgaacgcccattccacctgcaccacccccggcaaaaccggggtgaccgggaagtgcccgctgaaatacgccaggtccggtgggatgctcagttgcaaggtccattcaccttcggtttcgacttgcgccaacacctcaggccccttggggcgaggcgccagtaacaaagcttcgatatcggcctggggcagcttgccctggctgttcagcggcaattggcgcagcacacgccagcggcgcggcaaggccagggcttcgcaatgttggctcaggtgctggcgcagggtttgggtgagggtgcggcgcccctggttgcgcagcgcatgcagccccgcctcgctgagcaccaccacggcgcccagggacgcgcggttttcctgcaccacgcccaggcgggtgtcggcgacccattcatgggcgatcagcgcctgttccagcatcggcagggagatgcgtttttcttccagcttgacgatacggtccaggcggcccagcagttcaaaccggccatcggcatggatgcgtgcggcgtcggcggtttgttcgatatgcccttcaggcaggtactttgaggcgatgcgtaaagcgccctcggcatcctggctcagtcgcacatctgcaaacggctgccagggctgcgcgccctggcgccaggcgatgccgccggtttccgagctgccgaggatttctgtcggccattgctgcaagcggtcgtagaggctgccggccgcatcaatcggcagcgcgccaccggaggaaaacacccgtgcaacctggctcagtgccggccagtcaaggttgtcgcccatgcgcttaagcagcgccgggctggcaacccaggcaaattgcgggtgctcacggctggcgcgctgcatgtcttcggggaacgccagttgcttgcgcacgaaagtgcgaccggcgcacagcggccacaacacgcgaaacagcaaaccgtagatgtgttgggtggcgacgctgccgatgatgcacgcgcctttgaggtctgcgccccacagcgcttccaaggcctctacttcattggccagctggcgcagggacttgtcgatgcgcttgggctcgccgctggagccggaggtgcacaggctcagttggcagttgtccaggtcgagggcggcggcgctcaagggcgcttgatacagcgcgtccaggtcgctggcgtccaccagccaggcatccacggcagcggcccagcgttggcgggtctggggttgcaggtcggcgggcagcagcacgctcgcaccggcccgccaggcggccagcagcgcaatcgccagcagcccggcgtcttccaggtgcacggccaggcgccggatgccctgggcctgcaagcctgcggcgaggctcaaggagcgctcgcacagttgcgcgtgattcatggcgggctcggtagtcaccccacgatcccgcagtggctcaagcagcaaatgctcaagtttcaaccctttcatacgcggcctcgaaccctttgtcgtaccagccattccacggcaaacaacagccccatcaacccgtaggcgatcaggccgttgtacaacgtccaccagctcagcggcgcccacagggtgagcgcggcggcgagcaggccattacagagaaaaaacacactccacaccagggtgacccggcgggtatacaccaccgcgtggggcggcaggtgcgggtcggtcatgcgcgccaggcgctcgaccatcggcgggccgtacttcaggctaaggccgaacagcgccagcataaacgcgctgacaaggctcgggtaccagcgcagccactgcgggttatcgaaccaggccagcgccaggcaaaacacgatcaccaccaccgccatccaccggctgcccgggcgctgcgcagcggtgagcgcgcgcagcagccacaggctgcccagcaataagccgaactgccagggtgcaaagtgctcggtgccgtaatacaccgcgaaggggtacagcagccccgccaataacaggccaaggccgatcagccggctcatgcggcgggctggaccagacggtacaccgcctctaccacgtcgttcaccgtgcgtaccgccttgaattcttcggcggcaattttcttgccggtctgacgcttgatgtggtcgatcaggtccacggcgtcgatgctgtcgatttccaggtcctggtacaggttggcgtccaaggtgacgcgttccgggggcagttcaaacagttccaccaaggcgtcgcgcagggtgttgaaaatatcgtcacgagtttgcatggtacggtctcaagctgcctgtcgggccgtgacgaacgccgcaaggctggccacgttggtgaagtgattgcgggtgtccttggcgtcggcatcaattttgatgccgtaggttttctggatcgccaggcccaattccagggcatcgaccgagtccaggcccaggccttcgccaaacagggtctggtcgctgccaatatcctcggggctgatgtcttccaggcccagggcctcgatgatcagcagctttatgtcgtgctcaaggcggtgttggtcgctcatcttcggcgagctccttaatgaaatagtgatgcaggtgatcgttgagcttgcgtgaagcctggggcgcgggcccgactgcggcaaacgcttgtggctctatatcggcgcccacgcgcaaactgaagtgaaatcgacggtgggggatgcgataccagggttcggccttggtcagggtggtggggctgaccttgatcaccactggcgtgatgattgtcgcaccgcgcagcgcaatggccgcgccgccgcgatgaaaggccggcgccgcgccgggcgtggtgcgggtgccttcgggaaagatgatcagcgtctggccggcgcgcagggcgtcggctgcggcatcgagcatgtcggcgctgccgtcgttgctgatgtagccggcatcgcgcaccgggctgcgggtgaacgggttttggaacagactctgcttgaccacgcagttggtctggcgcatcaggccgatcaggaacaccacgtcgatcagcgacgggtggttggcgacgatcatctggccagggcggccaagcttttcggcaccctcgacgctgtacgtgagaatgcccaggcccttcatcaagcgaataaaaaaccagaacaggcaactgatggtgtggcgtgcacgccgttggtgctggctggcgtcgcccggcaggcaactgagcagtggaaacaccagcaaacgcaggcacagcccgccgatgccaaacaggcaaaagctgagggccgtggcaaacaggcgccagtaataggcctgccgtggcttgtgggtcagggcttgcgttgccagttccatactcggttcttccaggcatgttggcaggcgccctgatcggtcagcagggtgcgcagcaggttcagggcgtggggccactgggtttgagtgagttggacagtgccggtggtgagttccagttgccactcgtcgcccggcgtgagcaacaggccgagggcgtaggggaagggtacatccgtgatccagctggcataggcttggggcggttgttcttcggtgatcaccagcaacacggcgggtgcgccttcgttgagcaacgcggcggcttcgagcaggccgtgttcgaggccatcgccggcggcggcgagggcggtcatctcgctggtttcattacgcaggatcgaccacaggccgatcaccgcgttatgcaccgacaggctgaactgagtgggcgacagcggctgctcgttggccaggtcgctgaggatgtccagggtgcgcggggtttcgccgtggcgggaaatgaacaccagcggcaggtcttcaaggccctcggccagcggccagccgacgctgaacgccatgcgcgccagccggctcaagcggcggcgctgcatagctggcaaaaatgacacatcgggggacgcttcgctggcaggcagcaacaccgggtcccggcaccaggcgtgccagtcgtccgcactctcaaggccaggagcccaggcgcgccattgggcgatgttgaagttgatcactgagaagttatcccgcccctgcgggcttccatgtgcggccaatggccccggattccgggacagggagcaatggccgaatggcgcgcattatcccggtgccgtggagttctagcaaatagtggtgaaaatttgttcactattgatcacaaattaagttggaagaacttacagattcttggtcatggctgatcgagtgtggaataggcgcactcctatttgtttgttagccagatgcggcgccctgatgaacgaggtagctaatgggcgcttttgcgctctacactcgggcattcattgatacacggaggtttttccatgcggcgcgtggtgttcaatcaaaaaggcggcgtgggcaagtccagcatcgcctgcaacctggcggcggtcagcgccagcgaaggttatcgaaccctgttggtggacctcgatgcacaggccaactcaacccagtacctcaccgggctgacgggcgacgacatccccatggggatcgcggattttttcaagcagacgttgtcttccgggccgttttcgaagaaaaacaaggtggatatctacgaaacgccgttcgacaacctgcacgtgatcaccgccaccgccgagctggcagacctgcagcccaagctcgaagccaagcacaagatcaacaagctgcgaaagctgctggatgagttgagcgaggattacgaccggatttacctggatacgccgccagcgctgaatttttatgcggtttcggcgctgattgccgctgatcgcgtgcttattccattcgattgcgacagcttttcgcgccaggctttgtatggcctgctagcagagatcgaagaactgaaggacgaccataacgaaggcctggaagtggaaggcattgtggtcaaccaatttcaggctcgtgcgagtttgccgcagcagattctcgatgagttgattgccgaagggctgccggtactgccggtgtaccttgcaagctctgtgcgtatgcgtgagtcgcaccaggagagcaagccgctgattcatctggaccctcggcataagctgacgcagcagtttgtggagctgcataacttgctggaaaatgcctgaccccacaggcaacatcgaacactgtgggagccgggcttgcccgcgatgagggcggcacattgagtcaatgtgtcgcctggaacaccgttatcgcaggcaagccagctcccacagtttggattgcatttcggcaggtgagttggatttgtcccacagggtctgtaggaagggtctggcaattgggcttgtgccttgtaaccttgcctacagctacgccagaatccgccggcttgtgcgtctggatgggcgtctctaaggtttgccggtcgctgaatgttcagtgatcgggtttagtagcccgtggtgagacgtacggcaaatcgtcgatcaggatcttcctggattcgatggtggctgtacggagggcgctttcgagcgcgccggttgcgtctccccggtctactaacctgcgtacagctgccaccctccgtttagtagcgggctggttgcggctccccaacccggagacgatccatggctaacctctataccgtttcacccaacctccccaccgaaaccctcgtgctcaacagctacgaaaccttctcttcggtgcgcaccttgctactcaacctgtccaacgacctcaccggcgaacaccgcgacgtagcgctggccatccaccagttaagcgaactgggcgtcatgctggtcagccagatgatggaccacgaagccccgctgacctaacgcatgaaatgcatctaatgtgggagctggcttgcctgcgatggcatcacctcggtgtaccaggcagaccgagtcgcctgcatcgcaggcaagccggctcccacattgaccgagttgtttgaggggggctgtttacaccccctggctacgcaaccagctcatcaactgcggcaacgggaatgccccactctggcgcgccacttcgcggccgttcttgaacagaatcaaactgggaatcgagcgaatccccaactgcgccgacaggtgctggttagcttcactgtccagcttcgccagccggcacttgccttccaactgcccggcggcctgttcgaataccggcgcaaacgacttgcacggcccgcaccagtcggcccacacatcgaccaaaagcggcaggtcgcccttgatctggctggcatagtcaccctgtttcaaatcaaagggtttgctcagcaacaccgactgcttgcaacgcccacacttgggcgcgtcacccaggcgttcgccggggatgcggttgaggccgttgcaatgtgggcaggggattacaagaggtgcggacatcggagactcctgggtttggccagttgggtatttggtgtcgagacagaggtttatcaaggatatagatacttatccgctcacattttcgttctcgccagcgtgagcggtgtggctaggctttttgttgtgcgccaccggtctgtttgcggctatagcaaattgcgatagctcgaattcaggtttaacctccatagcaagatgcgataaggacgttgcatgcgagtcatcagtgaaagcaggatctgggaagcaaaaggaaaatggccgcgctctgcaacggctctggatcagtggtatcgcgtgatcaagcgcaacgcccccaaggactttgccgcaatgaaagccatgtttcccgccaccgacaaggtaggtgaatttcatgtatttgatattggcggtaacaagctgaggttgattgcgtcggtgcagtatcgaatgcagcgcgtttacatcaaacacctgcttgaccaccgtgattatgagaaaaacaaatggaaggaaaaaatcagatgagcgcacttatgcgagtggcggcagagcactggcagttcgtttcgcctgtgctgcgcaagccggaaaacgacgcagactacgacgcactggtgtgcggcttggacgagctattgagtctggtgggtgaagacgaggacagcccactgatgagcctggtcgacattctgagcgactggatcgaagcttatgatcgtgagcatcgcccaatgccagtcgccagcggggtcgatgtgctgcgctacatgatgcgtgagcacaacctcacccagagcgacctcccgggcgttggggcgcaatcagtcgtctcagagatattgagcggaaagcgccagctcaacgtgcgccagattcgttggctggccgagcgtttcggggtgtcggtggagacctttatctaaggggtcacgacgaacaactaatctccaaatgcttgccccaatccggcggccgctgcgcgtactgctccatccccgcctgttcctcaaacggtttggacagcacctcatgcagccgccgaatttcgctgtagtccccagcctcggcggcagcaatggcgttttgggccagatagttgcgcaggatgtacagcgggttcaccgcatgcatccgctcacggcgctgttcctgggtgtaatccccatcccgtgcaacacgggccttgtaccgctcggcccaggcatcaaacccggccatgtcgacaaagtcatcacgcaaccgcgccacggctaacgtcgccgattcgtcgcccaggcggcggaagaacagcgtgtagtccacaccgctgttttgcatcagcttgagcaaaccctccaccagcgtctggtcgtcttcttcggcggtggttagccccagccggcggcgcatcaggtccaggtagtgcgcttgatacagcggcaggtacaggccgagggcttctttcagtgcgtcaacgctgatgaacggcgtgagcgcctgggccaaggcgctgaggttccactgcccgatcggcacctggttgctgaaggagtagcgcccttcatggtcggaatggttgcagatgaagtgcgcgtcaaaatcatccagaaacgcgaagggcccgaagtcgaaggtaatgcccaggatcgacatgttgtcggtgttcatcacgccgtggcaaaaaccataagcctgccatttggcgatcatttcggcgttgcgctcgacgatttcacggaacatcgccaggtaaggttcgggctgctcgcggcactcggggtaatgcaggttcagcacgtgttcggccagttcggcctgctgctcgggtttcttggtgtagtagaagtattcgaagtgcccgaagcggatgtggctgtgggccaggcgcaaaaccattgcgccgcgttcctgtttctcgcgccataccggcgtgctggagccgatcacgcacagggcgcggctggtggggatgcccagcgcatgcagggcttcggaggcgaggaattcacgaatcgaagagcgcaacaccgcccgcccgtcgcccatgcgcgagtaaggcgtcatcccggcgcccttgaggtgtaaatcccaatgctcgccggcctcgttatagacctcgcccagcagcaacccgcggccatcgcccagttgcggcgtgtagccgccgaactgatgcccggaatacaccatcgcacgcggctctgcctcggcccacagcttgtggccgccgaacagctcggcaaacaccggcgtttgggccacggccgggtcgaggtcaagcagggccatggccgccttgctcgcgacgaccaggcgcggctcgtcgaggggctcgggcaatacgtgggtcgagaatgcgtcgcccaggcgtgcgaagcggttgtcgaaggtcagttcgtcgagggctttcaccggccatctccagcagaatgtccgagcattctgctggggatagggcatttagtcgagtttgctgggtggcggctccggcgcatccgccactttgcctgccggaggctccggggcgtcgggcttgtcgagcggctcggcaatggtcttgcgctcgtcttcggccggcaccaatttgtattcctggccgtgaagattcttcaggtagatttccatctgccggaacgagatgttgatgtgctgtttcttgaactcacgattgatgtagcggttgacctcgtccaacaccgggttgcggtcgcccaggtcgcgaacatgcatgcgcagttcgtggtcgagggtgctttcgccgaagttgaggaagtacacgtggggttccggctctttgagtacccgtgggttttctcgcgccgccttgagtagcaattccttcaccaggtccaggtcggagccgtagtccacgcccagtttcagggtgacgcgggtgatggtgtcggtcagcgaccagttgatcagttgcccggtgatgaaggttttgttggggacgatgatgtccttgttgtcgaagtcggtgatggtggtggcgcgaatgcggatcttgctcaccgtacccgacaggttgccgatggtgatggtgtcgccaatgcgcaccgggcgttcgaacaaaatcatgatgccggagatgaagttggcgaagatctcctgcatgccgaaacccaggcccaccgacagcgcggcaaccagccattgcagcttgtcccagctcacgccgagggtggagagcgtggtgacaaagcccacaccggcaatgatgtaggacagcaaggtggtggtggcgtaggcgctgccttgggccaggtcgagcttggacagcaccaggacttcgagcaggccgggcaagttgcgcgccagggcgaaggtgataccgatgatgatcgacgcgcccagcaggtcgccgatgctgatgggcaccatgctgatattcgtacccgtgccgctggtgtattcgtacagggtgacgttgtccaggtaggaaaataccgagatcaggtccgaccacacccagtacagcgccgcgataaagccgccgagcagggccaggcggatcaggcgcatggactgttcgttgacctgctcgatgtccagggtcggctcttcgatcaccgcttcgccgtcaccggcctccttggcagcctggcgtttggccagggcgcgggcgtaggccaggcgccgtgcggcaacacccaggccgcgtacaaaggtggcttcgatcaccagccagaacatcagtaggtacagggtgttgatcagccggtcgctgagtttcagcgcggtgtagtaatagccaaagcacacggcaataaacagcgcgatgggcaaggcggtgaacaccaccccgatagctttgcgaaacagcgaggccttttcgtgggttgggctgttgagcagcaggcggcccagcaaccaggccatcagcccgtagcaggtcagtaccacggcgatgcccagcacgtcgtcggccagcgccgccggttgatgttcggcaattgcgaccacggccaccagcgccagtaccaccagcccgagcttgcggatccagccttgcaggaattcgacctggggcctttcccagcgaaagtgcagctccgccacgccgcccggcgcgaggatgcggtaggcggtgtagaacaccagccaggcctgggcgatctgcagcaaggccgcgcccaggttggcgttttgcccgcgggcgtcgatctgcaacgcatagccgcacagcgccaggcccagggccacgggcatcgccagcaggatgttgatcaggatggcctgcggcgtatgccactggctgtcgcgcttgaagtggccgatgtcctggtgaacctttttcaggcgcacatacagcgcattgcgtcgccacagcagcgcgccgatcagcaacagcaacggcaggaacagcagcgggcgttgggtcaggccgtcatacagctcgctgacgctggacgcccagggcagggtagtgacctgtttgctcaagtgcgccggtacggtttccagccattcggtgtccagcggcttgttgctggggatccagaacatttgctcgtcgagcgtggcgcgcagggtgctggcggtgctgagcagttgtttctggttcagttgcagggtgatggattcgttgagcagtgcgctcagttcgcggctcaggcgttccagcaggtcgctgcgggtgatcgccacttccagcagggtgcggcgcagttgcggggtgacttcatctggcggctggttggccagcaggttgtccacataggcgctgggagaggtgatcagctcacgctgttggttgacctcgaactggtacaggcgaatgttggcgatgtcgtcggccaggtctttgtccacggtcagacgcggcagggcctgcttttgtttatagagaatcttggacagcagcaggctgcccttgagcacgttgatttgctcgtccagggccgaatcgctttgggtcacggtgtccagttgctgcttggtctgcaggtttttctgggtcaggtcgttgaggcggtcggtgcttttgagcaggtagtcggacagcttgagattgtctgcgctttccttggccaggatgctactgccgccggctttctgcgcttcgatggactgttgggtcaccgtctgctgggactgggccaggcgtttctggttgatcagggtttgcaggtcctggatttcttgctccaggcgtgcggttttttcctggatcaggtcgtgctggctgttgcccaagtcttgcagttggctgttgccggccaattcctggcggcgcaggggaatcaaggcattcagggccgccagttcggcgttgagctggttgcgctggtcgctgctgaggggcttgccgttgtctttgccaagcttgagcgtcgcgttgatttgctggatgcgcgtctggctgctgctgatttcggtctgagcgcgctcggggcgggtctgggcggcgatggtcaggctgttggcgtcggccagttctttttgcaggtcgccttgctgggtgctgcgttgcaccaataactgctcaagctgcggcaccggcaggctggcgtagcgttgggccaccggaatgattttggtggccttgaggcgcgccagctcacgctggttctcattggtctggcgcggggcctcttccagctggcgcttgaggtcggccaggcgctgctcgtagtcctgctgattgcccaggtaggtcagggtctgttgcagggtcgcctgcagcgccttcatgtcggcgtcaggcagcttgcggtcgggcagtttatccaggctttgctggacggcttcggcgctgggcgggtcggcggcgtatacgctgccaacacaaagggtcaggcccagcagggcagtggcgagaaaagtacgcagggttggcatagagaccggtcttgcaaagtgaagaatcggggcgtcgttgtcccgcagtttagaggaagagtccggggcccgggcgacttccttcggggaatctgacgccgactttgccaatcttgttcccgtccatgaccgcgacggtccagatggtgttgttccactccacctggtcgccgactaccggtgcaccgcccaccttctgggtgatgaaacggctcagcggcatgtccgggtcgataccctcaagcttgagcccgtacaaggcggaaaccgcgcccagctgggcgtcgccttcgaggacgaagtcgccgaagaagcgcaaatcgaggccccgttgcggtgcctggctgaacagtttgcccagagccggcaggttgtgttcgtggccgatcacacagagcaaatcgtcgacttccagcaccgtactacccgacggatggagcagttgctggccacgaaacagcgcggcgatgcgcgtgccttcgggcattttcagctcgcgcagggccgcgccgatgcaccatttttctgcgcccaggcggtagacgaagagctcccactcgctggtaacgtgcacttccagcgctgcccgggaaatcggcgccgggtccggcggtacggtgactttaagcaacttggccacccacggcaggctggtgccctgcaccaacagcgagaccagcacgataaagaacgccaggttgaagtacagctgtgcatggggcagaccggccatcagcgggaacaccgcgaggatgatcggtaccgcgccgcgcaggccgacccaggcgataaaggccttttcgcgcccgtggaacgctttgaatggcagcaagccaaccatcaccgacagcggccgggcaaacaggatcatccacagcgccaggcccagggcgggcagggcgatgggcagcaaatcgtgaggcgtgaccagcaggcccagcaccaagaacatcccgatctgcgccagccaagccatgccgtcgagcatatgcaaaatgccatggcggctgcgcaccgggcggttgccgatcaccagcccgcacaggtacacggcgaggaagccgctgccgtgcagggcgttggtcagggcaaacacgaacaggccgccggcgatcaccaggatcgggtacaggccgttggccaggttgatgcggttgaccagttgcaacatcagccagccgccacccaggcctaccaggccaccgatgccgaattcgcggatcaggtgcgtgagcaggctccagtgcaggccggtctggccgctggcgagcatgtcgatcagggtgacggtgaggaacaccgccatcggatcgttactgcccgattcgatttccaggctggcgctgacccgctcgttgaggcccttgccgcccagcagtgagaacaccgccgcggcgtccgtggagccgacgatggcgccgatcagcaagccttgaatgatattgaggttaaacagccaggccgcggccatgcccgtgaggccggtggtaatcaacacccccaccgtggccagggacaacgccggccacagcgccacgcggaaactcgccacccgggtgcgcaaaccgccgtcgagcaggatcacggcgagggcgaggttgcccaccaggtaggcggtggggtagttatcgaaaatgatgccaccgccatcgaccccggcggtcatgcccacggccaggataatcaccaggatggggatgcccaggcgtgaagaaagcgaactcaccagaatgctcgcagtcaccagcaacgcgccgatcaagaacaggctgttgatggtcgtcgcattcaaaggcagtactccagggcagggggggcaggacgcaaactgaccatgcagtctacgtgccagggattctaacctgttgaattgctgcgctgtcaaaaagcttttgtggctgcgcatcgatcaaatgtgggagctggcttgcctgcgattgcggtgtgccaggcgccaggggcgttagctgatagattgctatcgcaggcaagccagctcccacagggtatgcggtgtgagcaaaggcttatttcagaggcggaaccttccgaccatcccattcagatccactgccaaccgcgacaactcaccgctcgccgcgctggtctggctggcaccggtggccgattgcaccgacaagtcacggatattcaccaggttgcggtccacttcccgcgccacctgggcctgttcttccgccgcgctggcgatcaccaggttgcgctcgttgatctccacaatcgccgtgttgatggtgtccagcgacaggcccgcgccgcgggcgatattcagtgtcgattcggcgcgctcggtgctgttgcgcatcgagtccaccgcgtgttcggtgcctgtctggatgctgccgatcatgcgctcgatttcgctggtggactgctgggtgcgatgggccaacgcgcgcacttcatcggccaccacggcgaaaccacgtccggcttccccggctcgggctgcttcgatcgccgcgttcagggccagcaggttggtctggtcggccaggccacggatcacgtccagcactttaccgatatcccgcgactcattggccaggtcgccaatcagggacgcggtggcctgcacgtcggtactcatgcgttcgatggcgctgacggtttcctgcaccaggtcacggccgtcgccggcagaggtggtggcgttgcgcgaggcttcggaggtgctcactgcgttgcgtgcgacttcttccaccgcactggtcatctcgttgacggcagtggcggcctgttcgatttcattgttttgctgggtcaggccacgggcgctttcgtcggtgaccgcattgagctcttcagcggcagacgccaactgggtggcggagccggcgatacgttgcagggtgtcgcgcagtttgtgctgcatcttggccatggccgccagcaggcgcccggcctcatcgttgccgtccacggtgatcgggcgcgtcaggttgccttcggccacttcttccgcggcttcgagcgcctgggcgataggcagggtgatactgcgcgtcagcaaccaggcgaacagcaaggtcagcgccgtggcaaccaccagcaggcccacgactaggtcaaaggccatgtcgtattggtctttggcgcgctggttggtggcgttggcgtcgttgttattgatgtccagcaagcgggtcaacacggcgttgacctgctcggagttgtccagcaactcggtgttgagcaggctgcgcagctcgttgacctgattggcgcgagacaggctcttcatgcgctcttcaatctgacggtactggcccaacaggcgcacgtactcgttgtaggcgttgcgctcttcggtgctggagatcagtttttcatagatgccctgggctgtacgaatctgctgattgcgcagttcaaaggcttccagggtcttttgctgtacgtccggctcgcggttggtcagcaagcggtacgacagcacgcgcaggcgcagggtcagttgggtgaattcatccagggcgcgaatgctgggcacgctggccgaggtgatgtcttcggtggccgcacgaattttgctcatctggttcagcgcgaacacaccgagcaacaacatcaaggcgccaataaacgcgaagccgaggaaggccctcggggcgatattcatattacgaagagacatgctggagtcctgggggaggcgctatccatgcggccatgagacgaggtgtgcccgccttatcggccctgcgactaaagtcttaagggggcgcgcgcttttgtcgcatcggaccaggggttgggtgagttcaggaaccagatcgggtaaatgcagtcactaaggctcgaaagtgcggcccggccttgcaacatcgggctgcgcggccagggataaccctggcatccgaggtgaattttctttatcgtcaccgccctttttaaacgcccgagaaatcaaaatgttagaagcatccctcagccaattggaacaactggtcagcgacctcgtacagcagaatcaagaactgctgggcagcaacgaatccctcaaggccgagctggcccgcgccaaagacgaaaacgacagcctgcaactgaacctgatggaacaggaagaaaagcacggcgccaccgccgcccgcatccaggcgctggttgagcgtgtgagtgcagggcctgtcagcgcatgagtgagggcataaaggtcgtttcgattctcggagaggattactcgatcaaggcaccggccggcgaagatcagaccctgatgcatgccgtgactatgctcaaggcctccctggccgttaccaagaaaaagtacccgaccctgatcggtgacaagctattggtattggccgcgctgaacctgtgcgccgagcagattgaaatgcaacaggctcaccagcaggaactcgaccgttaccaagagcaagtcagcgccacggtcgatgtgatctccaaggtgatcggtcagccctgagggctagaaccactcgtcttgcatgcccaggcacgtatcgtcgcgtgcctccagaatcgccagttcatgatggcagctcggtacttcccaggtcaggaagtaccgggcggcctggagcttgcccttataaaaggccgcatcggccgcgtcacccttggccagcccttcttcggcgcggatcgcctgttccagccagcgccagccgatcaccgtgtgcccgaacactttcaagtacagcgccgagttcgccaggctgctgttgaccttgccttgggcgagatcggtgagcaggccaatcgtgacgctttgcagccggtttaccagttgctccaggggctctcgcaatgccgtgagtgaagggtgcctttgcgcccgggctccggtttcggcgatcaggcgaatcagttgcttcaagccggcaccaccgttctgcgccaatttgcgcccgagcaggtccagggactggatgccgtgggtgccctcatggatggggttcaggcggttgtcgcggtagtactgttccaccgggtattcgcgggtgtagccgtggccgccaagaatctggatcgccagctcgttggccttgaggcagaactccgacggccaggatttgacgatgggggtgagcaggtcgagcagttcgtgggcgtgcttgcgctcggtgtcggtggccagggtggtggtgtcgtcgaacagccgggctgcgtagaggcccaggtcaaaggcgccttctacataggctttctgggtcagcaacatgcgcttgatgtcggcgtgctggatgatcgccaccggtgcggtgctcgggtctttgctatcaggcaggcgcccctggggccgttcgcgggcgtagtccagagagtaaaggtagccggcgtaaccgagcatcaccgcgcccatacccacgccgatgcgtgcctcgttcatcatctggaacatgcagctcaagccctggtgcggtttgcccaccaggtagccgacacagttgccgttatcgccgaagtttagtgctgtggacgtggtgccgcgccagcccatcttgtggaacagccccgccagtagcacatcgttgcgagcgcccaggctgccgtcatcgttgaccaggaacttgggcacgataaacagcgaaatgcccttcacgcctgcgggagcgtccggcaacttggccagcaccatgtgcacgatgttttccgacagcgaatggtcgccaccggagataaagattttgttgcccttgagccgataactgccgccagccgcaggttccgcacgggtccgaatgtccgacagggaagaaccggcatggggctcggtcagggccatggtgccgaagaagcgcccgtcgatcatcggctgcaggaagcgctgtttctgctcctcggtgccgaagctctcaatgaggttggcggcacccatggtcaggaacgggtaggacgtcgacgcggcgttggccgcttggaaatgcgcgaaacaggcctgggacaacagcgtcggcagttgcatgccacctgcttcaaagctgcgtgctgcgttgaggaagccggcttcaaggaaggcgtccacggcgggtttgacctccgggatcaggatcgcctggccgttctcatagcgcggttcgttttcgtcgttcttgcggttgtgaggggcgaagtacttttctgcgatgttgcgcgccgtgctgatcgcggcatcgaaggtttcgcggttgtgttcggcaaaccgctcgcgctgggtcaggccctcggcatcgaggacttcatacagctcgaaagccagattgcgggaactgagcagcgtctcggacatggcggcgtacctttgaaggaattggcctgagtctaagtgcgcgaatggaggatgggtagcaagattgatctaagtgatagaagggcagaacgctggcgaggcatcgagatcgttcccacgctctgcgtgggaacgcctcttttgacgctccgcgtcacgcttttggacgcagagcgtccttaagctgcattcccacgcggagcgtgggaacgatcagccgcgatcagccgcgttgtgtcagttagccgatggtcatcaggctggcgttaccacccgctgcagcggtgttaacgctcaacgcacgctcgatcaccagacgctccagcgcaatcgccgtttcgccttgcgacataccatgtaccccaacaatcgccccaccgcgctgcgccacttgctggcacaccgcacgcagttggtcggaatcaccgtgatgcagcacggcgtcaaacaccacgtcgtccttggtccagtcggccacgcgcttgatctttgcctgaatctctttcggcaggcgtgggaacaaggccttggtcagctcggtttccggccataccgccgaaccaccgacggccaataccgcagccagttgggtcagcaggtcgccttccacttcggccaggcacagtacgtgctcgcgcggcaggatggcgtagctgttgcgctcgccggtcgggccggccagttggcgggtgataccgctttgcgactgggcggcgaactgcgtgcacagggcgctcagttcactgaacttattgctgtcggcccaggttttcagggcggtcagcgattggctcatggcatcacgcaggcgcacgtccggcgcggccaacttgtcgcctcgtacgaaggattgctcgattgcatcggtaggacgagtcgacagcaaacggtacaggtacagcgggcctccggctttcgggccagtacccgacaggccttcgccgccgaacggttgcacgccgaccacggcacccacaatgttgcggttgacgtagacgttaccggcgttgacgttgtcgatcaccttggcgatggtttcgtcgatgcgggtgtgcacgcccagggtcaggccatagccggaagcgttgatctggccgatgagctggtcgatctctttacgcttgtagcgcaccacgtgcagtaccgggccgaagatctcgcgttgcagttcgtcgaagctttccagctcgatcagggtcggcatcacgaaggtgccgcgcttgatctcttcaccgtcggcaatcgccacttggtaaacgttgcggcctttgtcgcgcatggcctggatgtgtttctcgataccggccttggcttcggcgtcgatcaccgggccgatgtcgaccgacaggcgttccgggttacccaggcggcattcagccatggcgcccttgagcatttcgactacacggtctgccgaatcttcctgcaggcacagtacgcgcagggccgagcaacgttgaccggcgctgtcgaaggccgacgacacgacgtcgatcaccacttgttcggtcagcgccgaggagtccacgatcatcgcgttctggccaccggtttcggcgatcagtggaatcgggcgaccctgggcatccaggcgaccggcgacattgcgttgcagcaggcgcgccacttcggtggagccggtgaacatcacacctttgacgcgatcatcacccaccaggcgggcaccgacgctttcgccctggcctggcagcaattgcagcacaccttccggaatgccagcttcaagcaggatgcgtacggcttgggcagccaccagcggcgtctgctcggcaggcttggccagcaccgggttaccggcagccagtgcagcagccacctggccgctgaagatggcgagtgggaagttccatgggctgatgcacaccaccgggcccaatgggcggtgggcgtcattggtaaagtcgttgcgcgcctgcaccgcgtagtaacgcaggaagtccacggcttcacgcacttcggcgatggcgttggcgaaggtcttgccggcttcacgggccagtaagcccatcagcggctggatctcgccttccatcagatcggcggcgcgttccagaatggcggcgcgttcggcgggcggggtggcctgccagatcggcgcggcgctgatggcgcactggatggcgttgtcgacgtcttcgacggtggcttcctgtacctggccgaccacatcacgcaggtcggacgggttcagcaccggttgggctgcttcattgctggcggcgcaaccgagcatcggcgcggccttccagttgttgtgagcagtggcgagcagggcgcaggacaacgaggccaggcggtgttcgttggccaggtcgataccggccgagttggcgcggtcgctgccgtataggtcacgcggcaacggaatgcgcgggtgcggcaggccgaaaccgccttcctgggttgccatttgctcgatgctggctaccgggtcggctaccaattcctggatcgagatggactggtcagcgatacggttgacgaacgaggtgttggcgccgttttccagcaggcggcgtaccagataagccaacagtgtttcgtgggtaccgaccggcgcgtacacacggcacggacggttcagcttgccttcggaaaccttgcctacaacctgttcgtacagcggttcacccatgccgtgcaggcactggaactcgtactggccggggtaatagttctgaccggcgatgtggtagatagccgacagggtgtgggcgttgtgtgtggcgaactgcgggtagatgacttccggcaccgacagcagtttgcgtgcgcaggcaatgtaggaaacgtcggtgtacaccttgcgggtgtagaccgggtagccttccaggccttcgacctgggcgcgcttgatttcgctgtcccagtacgcgccctttaccaggcggatcatcaggcgatggcggctgcggcgggccaggtcgatgacgtagtcgatcacatacgggcaacgcttctggtacgcctggatcacaaagccgatgccgttccagccggtcagttgcggctcgaagcacaggcgctcgagcaggtccagggacagctccaggcggtcggcttcttcggcgtcgatgttcaggccgatgtcgtactgcttggccagcaaggtcagcgacagcaggcgcgggtacagctcgtccatcacacgctcgtactgcgcacggctgtagcgtgggtgcagggcggagagtttgatggagatgcccgggccttcatagatcccacggccatgggaggctttgccgatggaatgaatggcttgttcgtacgaggccaggtacttctgggcgtcgtgttcggtgagcgcggcttcaccgagcatgtcgtaggaatagcggaagcccttggcttcgaatttgctcgcattggccagggcttcggcgatggtttcgccggtgacgaactgctcgcccatcaggcgcatggccatgtcgacgcccttgcggatcatcggctcgccgctcttgccgatgatgcggcttaaggacgaggtcaggcctgcttcgttgtgggtcgataccagcttgccagtcagcagcaggccccaggtagcggcgttgacgaacagcgatgggctgttgcccaggtgtggctgccagttgccggtgctgatcttgtcgcggatcagcgcatcgcgggtgcctttgtccgggatacgcagcagcgcttcggccaggcacatcagcgccacgccttcctgggacgacagggagaattcttgcagcaggccctgaacaataccggcacggccgccggcactcttctgattgcgcagtttttcggcaatgctcgcggccagcttgttggtggcttcggccatcggtgccggcaggcgcgcctgttcgatcagcatcggcaccacttccggctcggggcggcggtaagcggcggtgattgcggcacgcaataccgattgcggcaggatgctctcggcgaactcaaggaagcactggtgggcgtggtcggcctggacctcgccggcatcatcggcctccttgctgctcaagccattgagctcggacagggttgcaccaccctcgagtttctccaggtaattgaaaatcgcctgcttgatcagccagtgcggcgtgcgatcaatggaggtcgcggcggccttcaggcgttcgcgggtcgggtcgtcgagtttgaccccaagggtggtcgttgccatttttttatcctcatgggtgccactaccgagtggcatctgctggcggcaagattagctttgcccatctcgaggtgcaaccgggtgcaacccttttgttggttaaatgttcgacgcttgatcggaaaaaaataaacacacgacggaatccgctccgcgctggtgcatttgcttctgagatcggctgttcttgctccgaaagggagcaaaaaaagcgcgtttgtcctaaaacatacttgggtgcaacttaatcggcagaaactggttgcaccttatttgctttgttgaatagcattcgcgcaccaaggtgcaaccaaccctcagggtgggttcatcggctggcggctttcctggggaaacgccagtcataaatgcgcggcatgcaggttcgtctatccggttatccacgggtggccgtccccatgaccgtcgctacataaaaacaaagccagggcgtcactcctatgagcgttagtaatccaaccctgatcacgttcgtgatctacatcgcagcaatggtgctgatcggcctgatggcctatcgctccaccaacaacctttccgattacatcctgggcggccgcagcctcggtagcgtggtgacagctctgtccgccggtgcttccgacatgagcggctggctgttgatgggcttgccgggcgcgatctacatgtccggtctgtcggaaagctggattgccatcggcctgatcgtcggtgcttacctcaactggttgttcgtggccggccgcctgcgggtgcagaccgaacacaacggcgacgccctgaccctgccggattacttctccagccgcttcgaagataaaagcggcctgctgcggatcatctccgccgtggtgatcctggtgttcttcaccatctactgtgcttccggcatcgttgccggcgcccgcctgttcgaaagcaccttcggcatgtcctacgagaccgcgctgtgggccggtgctgcggcaacgattgcctacaccttcatcggtggtttcctggcagtcagctggaccgacaccgtacaagccacgctgatgatcttcgcgctgatcctcacgccgatcatcgtgctgctggccaccggcggggtagacaccaccttcctggccattgaagccaaggacccgaccagcttcgacatgctgaaaaacaccaccttcatcggcatcatctcgctgatgggctggggtctgggctacttcggccagccgcacatcctcgcacgtttcatggcggcggactcggtgaagtcgatcgccaaggcgcgtcgtatttccatgacctggatgatcctgtgcctgggcggcaccgtggcagtgggcttcttcggtatcgcttacttctcggcgcacccggaagtggcaggcccggtgactgaaaacccagagcgtgtgtttatcgaactggccaagatcctgttcaacccatgggttgccggtgtattgctgtcggccattctggcggcggtgatgagtaccctgagctgccaattgctggtgtgctccagcgccctgaccgaagacttctacaaggcgttcctgcgcaagggcgcgtcccagcgtgaactggtatgggtcggtcgcctgatggtgctggtcgtggccttgatcgccatcgccatggccgccaacccggaaaaccgcgtactgggcctggtcagctacgcctgggccggtttcggtgcagccttcggccctgtggtactgatctcggtaatctggaaacacatgacccgcaacggcgcactggccggcatcctggtcggcgcgatcaccgtaatcgtgtggaagcacttcgaattgctgggcctgtacgaaatcatcccaggcttcatcttcgccagcctggcgatctacttcgtgagcaagatgggcgcaccgacggtgggtatggtcgagcgttttgatgctgcggaaaaagattacaacctgaacaagtaattcgttgggcgctcagcgcttagaggatgaacaaaaggcccgcgtactatgatcgcgggccttttttactttactggatcaataaaggagatggcgaccatccctgacaagccgagcgtgcagagaaggaacgttagatggagcagaagctttgtttgacgtggaaaggcccgcgcctgctccaggtcagcgacgcctcgccaagcattaaatcggggtagcgcaatgacgcaatatactgcgcaaagcctcgctatcctttcccttggtgaatttctcaaataaatgctgtggacggcgaccagtcgacatttgtccaggagtgcttccatggtctcgagttttcggtagcacaaaaagaacataagtatgtttgagatgattgctgcagatattgagctaatggcgaccaatatgattggaggccaattcatgaacgcctcaatactcatacaaaaactcacctaccttttcgccagccgtgccgccaaaatgccctcctgctgcgccgccgaggcccccgtcaactaacatacaggctagagcccctgggccagtactaggagctaataaaaaaatacacagtgctgtcccgccaaaaccacccgctaagcctccactaactcctgcgctcagttttcccagctctacatatctggctttcctgcactgctcctctctcccggtagaacacgcctcttttatctccagtgccgtcaccgtcgtactcaatgctatccccaacggcgtcccgtttttaagcagcttcgccgtcttcgaaatccgtgcgatggtctcttgataccggcttatgtcccccgtatgcaaatagcttctggtcgagacacctagcattttcttgatcgagccttcattgcgcagccccgtgccataacgcgcaaaaccacgcagttgagcgtccagccttgcaaacagtgttcggcgtcgtgcgagaacctcctctctggcggcaccaccgccccggcgtagtgactgtttgtgcagggcatcaatttcttccagggtttttgcaatgtcttgcaaatgcttgctccaggcatcacctgccgtgcctatacccagcgaggcataccccagcagcgtttgcagcaaatcatagttatgcagtgcaaaggcatccccgccttcggccatcacgctatggcgaatatcccaggcggctcgcattaagcgtgactcttccagggtacaggctgcggtggtgtcgtcgccgataatgacgagttgccccggtagcaccaccacattgcgaatgtgcgtgttgagcgcgtcgaacttggcttcggcgtgtttgcctaagcgtaatttggccttgagttccacggaggtttgttgctggtcattgatgaaggcgtagggctgggtcattacacattccccagcagtgactggctccaagcgtggcgattacctgccatgaacacattccttttgaatgaacatggctgcgcaatttaaacaggtgatgggaaggtgtcgtggttatggggggtgtttcggggtggcgttttcacgtttgggaaacaggctactgggctgccgtaatattctgtcagacgtgtgtttttttaccgcaatggggcttcagcacgcggctacccccatcaaatgaaggcggcggtaggaccttactgatttacccggtatgagcccaggccggccgtaagctggtgcagaatcgaccgcccacccttcgcagagaaacaccggatgttcgctcctgccaaccaacctgcatttactttggccctggacggggcgcccagtgacttcaaggtgttcgcgttcagcggcaccgaggccatcagccagccctatcgttttgaacttgagctggtcagcgagcagccggatgtcgatctggaggccttgctgcatcggcaggtgtacttgggcttcgacgatcaggggcatggcgttcatggcctggtgtatcgggttgcccagggcgactcggggcggcgcttgacgcgttaccagctcagtcttgcgccgcatctggcgtacctggcgcacagcagccatcagcgtatttttcagcataagacggtgccgcagattgttgctcaggtgttggccgggcaggggattcacagtgatcgctttgagttccggttgagcggtgattacccggagcgtgaatattgcgtgcagttcggcgagagcgacctggcgttcattcagcgcctgtgtgccgaactggggattcactatcacttccagcattcccccgaagggcatctgctggtgtttggcgatgaccagacggtgtttgcccagatggatcagcccacgccttaccggccaggttcgggaatggtggccgatacccccgcgatcaagcgcttcaccttgcaattggcgacccggaccacggcgctgaacctgcgcgattacgactttcgaaaaccccacgtcgagttggagggcacggctgccgacgagtcattgcccaagcttgaagcgcagcactaccctggcaacttttccgaccgagcccagggcagatgcctagcccagcgtggcctggagcggcacctcagcgactatcgcagcgcccatggccagggcgatgagccggcgttggccagtggccggtttttgcagttgcgtgagcaccctcgcgaggactggaatgatttgtggctggtgactcaggtgcgccatgaaggcaaacagccccaggtgctggaggaggcggtcaccgaggaggagggaggggaactgcgccagggctatcgcaacgcatttgtcgccgcgccatgggatgcggtgtttcgtccgcccttgccggagcagccgcgcccgacggtatcggggtatcaaagcgcggtggtcaccggcccggttgacagtgaggtccactgtgacgagtatggccgggtcaaggtgcaactggcctgggatcgtgtcggtgagcacaacgaccattccagctgctggctgcgggtggccagtggttgggcccatgaccgttatggtgtggtgctgatccccagggtcggcatggaagtgctggtggggttcgtcaatggcgatatggacatgccgctggtagtggggtgcctgcccaacaccgccacgccagtgcccctcgacctgccggcggacaagactcgtagcatctggcgtagccagagcagccctggcggtggcggctacaacgaactgcgtattgaggaccgtaagggcgccgaggaaatctacctgcgcgcccagcgggactggacccagcatgtgctgcatgaccaacaggtacaggtcgataaccagcgtcgtgtgcaggtgggcggcgagtcgcgccatgagttgcagggccaggagcagcgcatcacccacggcaaccgtttgaccgagctcaagcaggatgaccatctggtggtcggcggttcccagcacatgcgggccgggcagaccattgcgctgggcgccgggcaaagcatcctcattgatgcgggtgccagcgtgacgatccaggcgggcgggcagtcgatcacgttgtcagcgggcgggatattcagcagtgtgccgatccagctcggcagcgcgccggccccgatgccggcgccgttgatgcctggattgaacgagactttattggcggtggtgcccgcgccgttaagccgtgcgcaagtggtcagcctcaaacgcagcgcgccgttctgtgaagaatgcgagcgctgcaagagcggccagtgtgacatcggcgcccctgtacggagtgcgtcctgatgcccgcgcccttgacgcccattgcctggctggcgcactacccgttgcagccagatgaacagctgtacgccgtgctgggcaatgccagcaacgccaagccgcttgccgcctggcaagccacggccgctgcaaagatgccgcgaccgatctgggcgggcacggcctacgctgactgggatgaggtcatgccctgcgtgggcatcgttgagccgggcagtgcctttctcgattggatagccaccacccaagcgacggattggggctggctggcggtctcatccagcccgctggaggtggtgatcgagcatttgcagggcttgacccaggtgtacctgccggaaaaccagccggtgtttttgcgtttctgggacggcgcgcaccttttgccgatgttgcagtcattaggcgacgaggcggcgcgcgtgttgccggtgtttcagcgctacctggtcaacggccagccgctgtccgtggcgaccgggtcagtcgctgcggccccagccagcccctggtggcaggttccggcgtccttgctgacgcacatggcccagcagtcaccgcaggtgcttgtcgacaacctgctgcaatggctccaggagcagcgtcctgacctctacaccgcgtttaccccagccaccttgcagcacaaggtcgcctacttcacacgcaggccgcaaatcagccatggcgcattggctgattaccttgcctcgcaactcagttaagcccctggtgatagcgtgacatccgtgccgcctgccgtgcggccctgcacctttgcgtcggtagaaggtaaacttcgccccctgcgcaggagcaaccatgaattatcgtcacgcctttcacgccggcaaccatgccgatgtcttcaaacacctgaccttgacccgcctcatcgccctgatgtcgcgcaaggagcagccgttcgcctacctcgacactcacgccggcattggcttgtacgacctgcagggcgaccaggccaaccgcaccggtgaatacctggaaggcatcgcccgcctgtggggcgcaagcgacctgccgccgctcaccgccgactacatgcgcgtgctgcacgagatgaacccggatggccagttgcgctactaccccggctcgccggaactggcgcgccgcctcacgcggccccaggaccgtgtgctgctcaatgagaagcacccggaagatggcgtgctgctcaaggacaacatgaagggtgatcgccgcgtcaaagtgcacctgggcgaaggctggcatgtgccacgggccttgctgccggtgccggaaaagcgcgcgctgatgctgatcgacccgccgtttgaaaaactcgacgaaatgcagcgttgcgcggcgtccctcaaggaggcggtaagccgtatgcgccagacggtggcggcgatctggtacccggtgaaagaccagcgcatgttgcgccgtttctaccaggacctggccggcactggcgcgccgaagctgctgcgtgtggagttactggtgcatccgctggacacgcccaatactctcaccggctcgggcctggcgattgccaacccgccgtggggcttggaggaggaactgcgtgagttgttgccgtggctgtccaagcaactgggccagacccagggtggctggcagatggattggctcatcgccgaataaccgcctttccggccaaacacaaaccaatgtggggggcttgccccccgatagcggagtatcagccattacatccgtaactgacactccgctatcggggcataggtatctacacaatttcgggtacgacgctggacctgtggcgagggagcttgctcgagtggcggcctgacggccgacgcatctctacctgacaccccaagatctaaatgtgggagctggcttgcctgcgaagacggcctgacggtcgacacagttggatcgtgtacatatccattcctgcggtaacggccacttagggttccgccctgacggcggctnnnnnnnnnnnnnnnnnnnnnnnnnnnnnnnnnnnnnnnnatcaaaagcagatcaagatcaagagcggctcgcttcgcatcgtggttaccgtcggctaagacaacctacaaaattgtgtagatacctatggctatcgggggcaagccccctcccacatttggttttatgttgaccttagatcgggcaggtcacgcccgtaccgccgatcccgcagtaaccctgtggattcttcgccaggtactgctggtgatacgcctcggcgaagtacaccgtcggggcctcttcgatttccgtggtgatctcacccaggccggccttgctcagctcttgctgatacgccgcggcactggctttggccgccgccagttgctcaggtgtggtggcgtagatcaccgaacggtactggctgccgatgtcgttgccctggcgcatgccctgggtcgggttgtgcagttcccagaacatcttcagcaggtcttcgtatttcaccttggcctggtcatacaccaccagcaccacttcgctatggccggtgaggccagagcagacttcttcataagtggggttgggcgtaaagccgccggcgtagccgaccacggtgctgaccacgccgtcgcgctgccagaacttgcgttccgcgccccagaaacagcccaggccgaagatcgcaaagccgacgtcatccaggaacgggcccagcagtgggttgccgttgacgaagtgcgtttcgggcaacttcatcggggtttcacgaccaggcagagcttgttcttgagtaggcagcacgtttttgttcaccagaatttccgagcgcaagaccatgatcagtcctctcgtcaggttgagtaacagtaaattgtcagacagccagtgtgcccgagtgttacagcgctgtcaggcgattggcccgcgcgggtagcgtttaagcctgtgcagcagctcggcacccgggatcgggcggtcgaacagatagccctggcccacgtcgcaacggtgccggcgcaggaacgccaactgctcagcggtctcgatgccttcggccaccaccttgagcttgaggttgtgggccatggcgatcaccgctgaggtgatttccatgtcgtcctggttgtccgggatttcatggataaagctgcgatcaatcttaatgatgtcgatggggaattttttcaagtagctcagcgacgagtaaccggtgccgaagtcgtccatcgccagggtcaggccgaaactcttgagctggtccagttgcaggcgcgtgtcttcggtggcttccagcagcaagccttcggtcagctccagctccagcaggttggccggcagctgttcctccttgaggatggtcgcaatcgacgccaccaggtccgggtcggagaattgcttgggcgacaggttgatggccacctgcaagttgcctaggcctgcggcggtcaattgccggctcatgcggcaagcctggcgcgcgatccatttgccgatggggataatcagcccggtttcttcggccacgctgatgaactggtcggggcggatcatgcccttttccggatggttccagcgcaacagcgcttccatgcccagcaagcggccgctgcgcaggcacagcttgggctggtagaacacgtccagttcgttctgggtcagggcacggcgcaggttattttccacgaacagcttgtagctggcctcggcgttcagcgcttcggtgaacacttgcacctggtgcttgccgttggccttggccttgtgcagggccaggccggcgttgcgcatcagggtttgcgggtcgcggccatgcagcggcgcgcaggccaggcccacggagccggtgacgctgatcagctggttgtcgacgaacatcggcttgtcgagggtggccagcaactggctggccacctgctggccggtctcaaggtcggcgtcgtccaacagcaccgcgaattcgttactggcaaagcgcgccaggctgccgccgctgctcaagctgttgcgcaggcggcgcgccaggctgatcagcaacttgtcgccagtctggtggccgaggctgtcgttgatgcgcttgaagttgtcgatgtccaccaacagcaggctgatcgggctgtcgctgtcgcgggcaaagcgttcgtcgaggttgcgaatgaacgccggtcggttgcccaggttggtcaggttgtcggtgtaggccaggcgttcgatgcgctgctgcgccagcttggtctgggtgatgtcttcgtagatgccgatgtagtgggtcaactcgcggttgtcgccatacactttggaaatcgacagctggccccagtagggttccaggttcttgcggcggctcttgaactcgccttgccagctgttgcttttggccagggccgagggtgcgtcgaacagcaactcgctgaggttttccagggccggcagttgggccaggcgatggccgtggacttcttcggcgctgtactgggtaatcgcggtgaagctggggttgacgtactccaccacgccatcgcaattgaccagcaagaacgcgttggcgctttgctctaccgcgcgctggaacaggtgcaaggcgctggtggcggtgcggcggttgtggttgttgatgacctgggcgaactggtctgccagctcgccagcgaacgcgatctcatcggactgccacgcgcgcgggctgccgccttgttccaggcacagcacgccgacgacctggccatcgacacggatgctggcatcgagcatcgcgtggacgtccttggcgcgcaggctttcggccatttcccgggtacgtgggtcgcgcagcgcatgggtggcatcgatggcgcggctcgagtgcagggcttccaggtaatccgggaagccactggcgtcgatggcttcgggcaggtggtgttgttgatcggcacggtggtaggccgagatcggtaccaggtgatggccttcgaggttccagatgctggcgcagtcgatctggtagatgtcgcaggcgctgcgcgtgatcagctcagcggcttcttgcagggagttgggcgtggtgtagcgttggcgcgccagcagcaggatcaactcctgctgggcacgcacccgctccaggtgctgcaactgttcctgctgcgctcgctggttgagctccagggcgatttgcaggcggctgttctggttttccaggtcgacggtcggggcgggcgtgctgatctcgctgaacagcccctcaaccaccatcaggtagccgcgcaccaggtggcggttgtgttgtttgtaggcttcgcccatctccaaaacgcttagcgggccgtcatgggtgtgcagggtgtagcgcaccagataatgggggctctgggccagttgttgctggatcgcatcgtgcaactgatagcgcgcctggggttccatcaggctggcgtagggcgtgccgatcaaggcgcagagttcaaccgctggcaggccaaactgacgctcgcaattggggtcgaggtagagcagcgcccagcttgcctcattaagccgctcgaaacgcagcataccgaggcgcgaaggcaccggtaattgcgtcactacctcggccgccatacgggcgacatcgggttggcttttcatggggaaactcgcttggaaaaatgcgcactgcgctgggctcacgccctcttgactgtcgactgcggcaaggttgcatcatgcagcacgcagtgacaagagaggatgaaggctaagtgctataagcctgttatcggccgcgcgagggttttctgtaattggggtgatcgatggttcacgcctgtcctctgtaggagcgagggggacgcctagttcttgctcgcgaaaaacgccagggcaccgcgtttatccagaaggcccgcgtcatcgttgacgatcttcgcgagcaagctcgctcctacaaaaaaaacaggcaaaaaaagccccgccaagtggcggggttgaggtacgagcgtggcgctcggaaatcggtgtggcaagggccttcccggtaacaggaaggccctgtgacttacagcaggatggtgcggatgtcgttcagcaactggctcaggcgctgggtgaagcgcgcagccgcggcgccgttgatcacgcggtgatcgtaggacagcgacagtggcagcatcagcttgggttggaacgctttaccgtcccacacaggctggatggtggccttggacacacccaggatcgccacttccggcgcgttgacgattggcgtgaagccagtgccgccaatgtggccgaggctggagatggtgaagcaggcgccctgcatgtcgtccggggtgagcttcttgtcgcgggccttggcagccagcgcagccgcttcgccagccagttgcagcaggctcttctggtcgacgttcttgatgaccggtaccagcaggccatccggggtgtcgaccgcaaagccgatgtgcacgtacttcttgcgaatgatcgccttgccgcttggcgccagcgagctgttgaagtccggcagttccttgagcaggtgcgcgcaggccttgagcagcagtggcagcacggtcagcttcacgccggccttctcggccacggctttctgcgcaacgcggaacgcttccaggtcggtgatatcggcctggtcgaattgggtcacgtgcgggatgttcaaccagctggcatgcaggcctgccgcgccgatttgcatcaggcgggtcatcggcacttcttcgatttcgccgaagcggctgaaatccacggtacggatcggcggaatgcccgaaccaccggtagcgccgccggcagccggagcttccttggctttttgcatcatggctttgacgtaagcctgcacgtcttccttcagcacacggccgtgagggccgctggctgcaacagcgctcagctcgacgccgaattcacgggccagctgacgcacggctgggccggcatgaaccttggcaccgcttggcgcaggtgcggcagccgcaggggctggcgcagcttcggcttttgcggccggcgcaggggcagcagcggcaggtgccgcttcagccttggcagccggagcagcagccggtgctggtgcggcggctggcgcagcaccttgtactttgagcttgaggatgaagtcaccggtgccgacttcgtcttcgagcttgaccgcaatgctttccaccacgccggcagccggcgatgggatctccatggaggccttgtcggactccagggtgatcagcgactggtcggcttcgacggtatcgccgaccttgaccagcagctcgatgatctttgccttgcccgacgagccgatgtccgggacgtgaatgtcctggacggtcgcggcggcaggtgcagcggccggggctggagcagcctcggcagcggcaggcttttcagcggctggtgcaggtgcagcagcggccggagccgcggccgcaggggctgcatcggcagcgccttcgatttccagctccagcagttcgtcgccttctttcaggcggtcgcccagcttcactttcaggctcttgaccacgccggccttgggagcagggatttccatgctcgccttgtccgactccagggtcaggatgctctggtcggcttcgacggtgtcgccgaccttcacaaacagctcgattacttcaccttcaccgctgccgatgtcaggtacgcgaatgagttcgctcacaaaaaatctcctcagcagtccagtgggttgcgtttttccgggttgatcccgaacttgacgatagcgtcagccaccaccttgggttcgatctcaccacggtcagccaaggcttccagggctgccaacaccacgaagtgacggtcgacttcgaagaagtgacgcagcttcttgcggctgtcactgcggccgaaaccatcggtgcccaggactttgaattccttggacgggacccactggcgaatttgttcagcaaacagtttcatgtagtcggtagaggcgatgactgggcccttacggccggccaggcactcttcgacgtagctcttggctggcttctggccagggtgcagacggttgctgcgctccacggccaggccatcacggcgcagttcgttgaagctggtgacgctccatacgtcggcaccgacgttgaactcgtcacgcaggatcttcgccgcttcacgcacttcgcgcaggatggtgccagagcccatcagctgtacgtggtgcgccgcttccttggtgtcttcttcgagcaggtacatgcccttgatgatgccttcttccacgccggccggcatggctggctgctggtaggactcgttcatcacggtgatgtagtagaaaacgtcctgctgctcttcggtcatcttcttcatgccgtcctggatgatcaccgccagctcatagccgtaggttggatcaaaggtgcggcagttcgggatggtggcagccaggatgtggctgtgaccgtcttcgtgttgcaggccttcgccgttcagcgtggtacggccggcggtaccgccgatcaggaaaccacgggtgcggctgtcgccagcggcccaggccaggtcgccgatacgctggaagccgaacatcgagtagaagatgtagaacggcagcattggctggttatggctggagtacgaagtaccggcagcgatgaaggagctcatggcgcccgcttcgttgatgccttcttcgaggatctggcccttcttgtcttccttgtagaacatcacctggtctttatcgactggctcgtagagctggccgacggaggagtagatgcccaactgacggaacatgccttccataccgaaggtacgggcttcgtccgggatgatcgggacgatgcgcgggccgatgtccttgtccttgaccagctgcgccagaatacgcacgaaggccatggtggtggagatttcacggtcgcccgagccgtcaaggatagccttgagggtgctcaggtctggcgtcggtacgctgaagctgttggcgcggcgctgtggcacgaaaccgcccagtgcactgcgacgctcgctcaggtagcgggcttcggcgctgtttggctctggcttgaagaacggcaggttctccagctcttcgtccttgaccggaatgtcgaagcggtcgcggaacaacttcaggctgtcgacatcgactttcttggtgttgtgcgcggtgttcttcgcttcgccggcaccggtgccataacccttgatggtcttggccaggatgacggtgggttgttctttgtggttgaccgcttcgtggtacgccgcgtagaccttgtacgggtcgtggccgccacggttgagcttccagatctcgtcgtcggacaggtcggcaaccatcgccttgagttcaggcgtgttgaagaagtgctcacggacgaacgcgccgtctttggctttgtagttctggtactcgccgtcgatgacttcgtccatgcgacgttgcaggataccgtcgacgtccttggccagcagtgggtcccagaagcggccccagatgactttggtcacgttccactgagcaccgcggaacacgccttcgagttcctggatgatcttgccgttgccgcgaaccgggccgtcgaggcgctgcaggttgcagttgatgacgaagatcaggttgtcgagcttctcgcggccggccagggaaatggcgcccagggattccggctcgtcgcactcgccgtcgcccaggaagcaccagactttctgcttgccttcagggatgaagccacgggcttccaggtacttcatgaagcgtgcctgatagatcgcctggatcgggcccagacccatggaaacggtcgggaactgccagaaatcaggcatcagccaagggtgcgggtaggacgacaggccctgaccgtcgacttcctggcggaagttgttcatttgttcttcgctgatgcgaccttccatgaacgcacgggcgtagacgcctggcgaggtgtggccctggaagtagatcaggtcgccgccgtgttcgtcggtcggggcctggaagaagtagttgaagccgatgtcatacagggttgcgctggaagcgaagctggagatgtgaccgcccaggtccgaatctttcaagttcgtgcgcattaccatcgccatggcgttccaacgtaccagcgagcgaatgcggcgttccatgaacaggtcgccaggcatgcgtgcttcgtgggtaacggggatggtgttgcggtatggcgtagtgatggcgtaaggcagttgcgagccgctgcgggtcgcgagttcgcccatacgggtcatcaggtagtgagcacggtcttcgccttctttgtcgagaaccgattccagggcgtccagccattcctgggtttcgacgggatcgaggtcttgcatggcttgctccagggcggaaaggctaccagaatcggttgcctgaagtttgcgactggccttgtgggcagacgacataaattcttggatggccgaaggttgcttcggcgtcctgtagttttactacaaatcgtcggccatttcagcctttcgaatgtatatacgagtagtaaaactacacaagactgagcgtatggctcggtcttgctggtgagcataatcgttattgttggtctattgcgaacaagaaaaggtgaaactttgatgttgcctgccaagattaatttaatttcagctatttctaacctttgttcgacagtccttcatcgagcatggctcttgccttcacaactacacgccatttacacgccgatcaaggatagaccatgagccttccaacgctggccgaactgccggccattctgttgccttacgccaaccgggccgagcagtcatttcgtgacgcagtggccgcgctggctgacgatcatggcctttctgcgtggatgccgcaacggtgggccgacttcgcccgcgtatgcgccgccagtgatttcgtcattgaacagagtgttcgtgaccctttgatgttgcttgagctagcggcctggggcgagctggaccgcggctttgcgcccggcgagctgtgcagccagatagccggcgccgtgcaacaggccgaaacagaagatgagctgggccgtgtgctgcgccgccaacgcacgcgccagcaggtgcgcatcatctggcgcgacctcacacgccaggccgatttggtgcaaacctgtcgcgacctgtccgacatggccgacgcctgcatcgaccaggcctatcaatggctgtaccagcgccactgcgcccaattcggcacgccgaccggcgcacgcagcggcgaggcgcagcacatggtcatcctcggcatgggcaagctcggtgcggtggagctgaacctgtcgtcggatatcgatttgatcttcgcttatccagaaggcggtgaaacgatgggcgtgaagcgcgccctggataatcaggagttctttatccgcctgggtcaaaagctgatcaaggccctggacccgatgaccgtcgacggttttgtcttccgcgtcgatatgcgcctgcgtccctacggttcggccggcgccttggtgctcagcttcaacgcgctggagcagtactaccaggatcagggccgggactgggagcgctacgccatgatcaaggcgcgggtggtggccggcgaccaggtggctggcgcgcaactgctcgacatgctgcgcccgtttgtctatcgccgttatctggacttttcggccattgaagcgctgcgcaccatgaagcaattgatccagcaggaagtgcggcgcaagggcatggccgacaatatcaagctgggcgcgggcggcattcgtgaggtggaatttatcgcccaggccttccagctgatccatggcggccgcgacctcagcctgcagcaacgcccgctgttgaacgtgctgggcaccctggaaggccagggttatttgcctgcggcggtgatcagcgagctgcgcagcggttacgagtttttgcgttacaccgaacatgcgatccaggcgattgccgaccgccagacgcaaatgctgccggacagccccgaagaccaggcgcgcattgcctttatgctgggcttcagtgactgggcggcgttccacgagcgcctgatgtactggcgtggccgagtggactggcactttcgccaagtgattgccgaccctgatgaagaagagggcgaagaaagcgaattggtggtcggtggtgaatggttgccactgtgggaggaatcccaggatgacgacgccgcgtgccgccaattgagtgaaggcggtttcaccgatgcccccaaggccctcaaggccttggccagtctgcgcgccagcccgcagttgcgcgccatgcagcgccttgggcgcgagcgcctggatgcgtttatcccgcgcctgctggcccaggccgtcgaacatgccaacccggacctggtgctggaacgcgtgttgccgctggtggaagccgtggcccggcgttcggcctacctggtgctgcttaccgagaaccctgacgccttgcgtcgcctgttgaccttgtgcgcagccagcccgtggatcgccgaacagatcacccgtttcccgctgttgctggatgaattgctcaacgaaggccgcttgttcaagccgccgctggcgccggaactggctgcggagttgcgcgagcgcctcacgcgtattcccgaagatgaccttgagcaacagatggaagccttgcgccatttcaaactggcgcaccgcctgcgggtggctgcctccgaaatcgccggcagcctgccgttgatgaaggtcagcgactacctcacctggctggccgaagccattcttgaacaagtgctggccctggcctggcgccagaccgtcgcccgtcacggctcgccgcagcgcctggacggcaccctgtgcgatcctggcttcatcattgtcggttatgggaaagtcggcggcatcgaactggggcatggttcggacctggacttggtgtttatccatgacggcgacccccaggccgagacggacggtgccaagccgatcgatggcgcgcagttctttacgcgcctgggccagcgcatcattcacctgctgaccacccagaccaactccggccagctgtatgaagtggacatgcgcctgcgaccttccggcgcctccggcttgctggtgagttccctgggggcgtttgaccgctatcaacaaaatgaagcctggacctgggaacatcaggccctgatccgtgcgcgggtgctggtaggcagccaggatgtgggccaggcgttcgagcaggtacgggccaacgtgttggggcgtgaacgggacttggagaagctgcgccaggaggtgagcgagatgcgtgccaagatgcgtgacaacctgggcaccaaggccacgacggccggcaggggcgccaatgccttcgaggccacggcggtgttcgacctcaagcaggacgccggaggtatcgtcgatattgaatttatggtgcaatacgcggctttggcgtggtctgcgcaacatccatcgttgctgcgctacaccgacaatatccgcattttggagggcctggagcaggtcgggctgatgcccgccgccgatgcccatttgctgcgtgaggtgtacaaggcctaccgctccgccgcgcaccgccaggctttgcagaacgaggccggcacggtcgcgggggaccagttcgccgacgagcggcgacaggtgatgcgaatctggcaagcgctgggcttaaattgaaactcgactgattggcgacgccaatttttatatgggatgcggattaatgtgggagccgggcttgcccgcgatgcaggcgcctcggtttatcagtgataccgaggtgatgcaatcgcaggcaagccagctcccacataaagatgctccctggcgcaccgcgatctacagtcattatcgaggcggggaggcataagcctccccgcatcgtttgtggaaactacatgaatattctgatcgttgggcccagttgggtcggtgacatggtgatggcacagacactgtttcagtgcctgcgcctgcgctatccagactgccagatcgacgtgctcgcccctgagtggagccggccgatccttgagcgtatgccccaggtgcgcaaggccttgagcttcccgctcggccacggcgccctggagctggcgacccgccgccgcatcggcaaatccatggcgggccagtacgaccaggcgatcctgctgcctaactcgctgaagtcggcgctggtgccgtattttgccggtatccccaagcgcaccggctggcgcggcgagtttcgctatgtgctgctcaatgacgtacgcaccctggataaaggccgctacccgttgatgatcgaacgctttatggctttggcctacgagccgggcgctgaactgcccaagccgtacccgcgccccagcttgcagatcgacccggtgacccgcgacgcggcgctggccaagtttggcctgaccctggatcggcccgtattggctctgtgccctggcgccgagtttggcgagtccaagcgctggccgtcggagcattacgccaaagttgccgagacgaagatccgcgaaggctggcaggtgtggttgttcggttccaagaacgatcattcggtgggtgaagacatccgccagcgcctgatccccggtctgcgtgaagaggcggtgaacctcagtggcgacacgtctctggccgaggccatcgacctgttgtcgtgcgccgactcggtggtgtccaacgactccggcctgatgcatgtggcggcggcgctgaaccgtccgctggtggcggtgtacggctccacatccccaggcttcactccgccgttggccgacaaggtcgaagtggtgcgcctgggcctggattgcagcccgtgctttgagcgtacctgccgcttcggccactacaactgcctgcgccagttgctgccccagccggtcaccgatgccttgcagcggttgcagggcgacgtggtcgaggttcgctgagttgcgggttctggtaatcaagacctcatccctgggcgacgtgatccatgccttgccggcgctcaccgacgccgcacgggcgatccccggcattcggttcgattgggtggtggaagaaggctttgccgaaatccccacctggcatccggcggtcgacaaggtgatcccggtggcgatccgccgctggcgcaaaaacctttggcaaaccgtcaagagtggcgaatggcggcgcttcaagcaggcggtgcagtcgaccaaatatgacttggtgatcgacgcccagggcttgctcaaaagcgcctggctgacccgctatgtgcgggcgcccatcgccggcttcgacaaagattctgcgcgagaacctctggctgcgcgcttttattcccggcgcctggccgtggcccgtgggcagcatgcggtagaacgcttgcgccagctgttcgccgtggcgctgggctacgacctgcctcaacgcctgggcgactacggcctgagcgtcgaaaaactgctcggcctgccgccgaaaaaaccgttcgtattactgctgcacggtaccacctgggacaccaagcactggcccgaagcctattggcgcgagctggccgaacgcatgggccgcctgggcgtggacgtgaaactgccgtggggcaacgccgccgaaaaggcgcgggccgaacgcttggccctgggcctgcccaacgctgaagtgttgcccaagctcaatctggcgggcgtggcccgtatattggcgagcgcccgtgcctgcgtggccgtcgacaccggcctcggccacttggcggcggcattggacgtgccgaccatttccctgttcggccccaccaacccaggccttaccggcgcctatggcaaaggccagatccatttggccagcgactggccgtgtgcgccttgcctgcaaaaacagtgcacgtatcaacccactgccgacgacctgcggcggttcgacatcgcgcgcgagtcacccctgtgcttcacgcgcctgaatcctgagcgtgtcgcaagccggctgagcacgttgttactggccgaggagcagcactgatgcaactggcttttgttctgtacaagtacttccctttcggtggcctgcaacgcgacttcatgcgcatcgccctggagtgtcagcagcgcggccacagcattcgggtgtacaccctgatctgggaaggcgatatcccgccaggctttgaagtgctggtggcgccggtcaaggccttggtcaaccaccgccgcaacgaaaagctctacgcctggattcaggccgacctggccaagcgcccggtagaccgcgtggtgggcttcaacaagatgccggggctggacctgtactttgccgccgacggtgtgttcgaggacaaggcccagaccctgcgcaacccgatgtatcgctggttcgggcgctacaagcactttgccgaatacgagcgcgccgtgttcgataagaacgccaagacgcagatcatggtgttgtccgagcatcagcagcagttgttcacccagtactacggcacccaggctgagcgttttcacctgttgccaccgggtatcgcccgcgaccgccgcgcgccgccgaacgccgccgagatccgtgccgagttccgcgctgaatttcgcttggctgaagatgatttgctgttggtgcagatcggttcggggttcaagaccaagggcgtcgaccgcagcctcaaggcgctggccgcactgccttcgcgcctgaagaaacgcacccggctatttgtaatcggccaggacgaccccaaagtattccaattgcagagcgcagcgctgggcctgggcgaccaggtgcagttcttcaagggccgcaatgatattccgcgcttcctgctgggggccgacctgttgattcaccccgcgtacaacgaggcggccggcatggtgctggtcgaagcggtggtcgccggcctcccggtactggtgagccaggtgtgcggctatgcgttctacatcgacaaggcccagagcggccgggtgttggacgagccgttcgagcaaacccagctcaaccagtatctggtcgatatgctcgacgacccacaagcgcgtgcgacctggagtcgcaatggtctggccttcgctgagacggccgacctctttagcatgccgcagtacgctgcggacctgattctggcggagccaaaccgatgaagttgattctagccgaacccttcaagaccctctgggacgggcgcgatgcgttcgccgaggtcgagaagctggaaggccaggtgttccgcgagctggccgctcgccgtacgttacgtacggtggtcgagggccagccttattttgtgaagattcaccgtgggatcggctggggcgagatcctcaagaacctggtcaccgccaaattgccagtattgggcgcgggccaggagtgggtggcgatccagcgtttgcaggcgcttggcgtgccgaccatgaccgccgtggcgttcggtgaaaaaggcagcaacccggccgaccagcattcgttcatcatcacccaggaactgacccccatcatcagcctggaagacctgaccctggactgggtcaagcaaccgcccgtgccggccatcaagcatgccttgacccttgaactggcgcgtaccgtcggcgcgatgcaccgtggcggcgtcaaccaccgtgattgctacctgtgccatttcctgctgcacaccgaccggcccatcagcgtcgacaacctcaagctgtcggtgatcgatctgcaccgcgcccaggtgcgagcgacgatccctgtgcgctggcgcaataaagacctggccggcctgtattactccgcgctggagatcggcttgacccagcgcgacaagctgcgttttctcaaggcttacttccagcagccgctgcgccagatcctggcggagcaaaccgcgctgttgtctgcgctggaacgcatggcagcaaagctgtatgcgcgtaaacaacgatacggggatgcgatctgatggcgggttggaatctggaacctgcctacgccgccctggcggatgactttggaagcctggacgcggtgttcgccctgcaaggcgagcggctgacccgcgacccgttgtctgaagtgatccgggtggagcgtggcggggtcaattattacgtcaaacgctacgtaggtgccggcaagggcctgcgtcgttacctgggccggccacgggtgaaatccgaatggcagaacctcaagcgtttcgccaagtggggcatccccaccgccgacgtggtggcctggggcctggaccgcaagggcctggcctataaccgaggtgccatgatcacccgtgaactgcccaaaaccgaagatctgtcggtgctggccgagcgtcacgatgagcgcctcaaagatccccggtgggtcgatggcatcagccgccagctcgccgaatacacgcgcaccatgcacgatcaccgcttcacccataacgacttgaagtggcgcaacctgctggtggacgaccagcgcaccctgtacctgatcgattgccccaacggcgatttctggcgcggcttctggctcaagtaccgcatcaccaaagacctggcctgcctggacaaagtcgccaagtatcacttgtcggccacccagcgcctgcgcttctacctgcaatatcgccagcgcgcgcacttgaccgcgtcggacaaacagcgaattcgccatgtggtgaagtttttcgagggacgcgaatgagtgacttcctggcggccgaagaccgcgctctgcttgagcgcaacggtctggcgaccttcgacgcgttgtgggccaagcaactggatgcggtggacgagccgaacaccagcggcgacggttggagcagcgtgtatcgcctggagcttgaggggcagggttactacctcaaacgccagagcaattacctcacgcgcaccttgcaccgcccgtttggcgagccgagttttgcccgcgagtttcgtaacatcagcctgtatcgaaagctcggcatcccggccctgcaagcggcgttcttcggtgagcgcaaggtcaagggcgagcgccgggcgatgctgctcacccgtgcgctggatggctggaatgacctggactcgttgctggagcagtggccgcaattgagcgcggcccagcacagtgcgatcctgtcggcgtgcggcaagctggcgcgtcatctgcacagcgtcgggcaggtgcatggctgtttttaccccaagcatattttcctgcagcctgccggtgagggttacgccgcgcagttgatcgacctggagaaaacccgcccgctgttgtttggctggcgtgaccgggtcaaggacctggaaccgctgctgcgccgcgcgccgcaatggtcggatgcgcaggtgcgccaactgctggcggcgtaccttgagcagcccgaggacagtgccttggtcgccacttggcaccagcgcctgaccgcacgccgcagccacaaggagaaccgctgatgcgcttatccgagctgaaaacagctgggcgtacccccagcctgccgctgaccctcgacctggcggatgccgccggccctgggcaattgcaattgctgagcctgctgcgggtgttgccggggcagcgctacgtgggggccgccgtgtggcggggtcgcccggtgttggccaagttgttggtgggcagcaaggcggcgcggcattttcagcgtgagctcacaggtgtacgcctgttggctgagcagggcctgaccacgccgttgctgctggccgatggtttgcaggacggcgagggtggctggctgctgtttgaatttatcgagggcgctcaaagcctgtccgacgcttggctcgccgtcgaaaacctgccgccgttggcggacgaacaaactgccgtgctcgccgaagcgctgggcgcgattgcccagatgcatgccaagggcctgtggcaggaagacctgcatctggacaacctgctgcgcaaagacggcaagctgtatttgatcgatggcgccggcattcgtgtcgaagaggcgggcaagccgctgtcacgcaatcgcgtgctggaaaacctcggtgtgttcttcgcccaactacccaagagccttgagccgtttaccgaagagttgctggtgtattacctgctggccaacggcgaacacgccttgccaatgcaagccctggaaaagcaggtgcgcaaagtcagctcctggcgcttgaaagactacctggacaagaccggccgcgaatgcacgctgttcagtgtggtgcgcggcgcttttggcttgcgtgcgatccgccgcgaagaagaagccgccatggtgccggtgctggagcaggccgatgcgttgctcgaccagggtcacctgtacaagaccggtggcgcggcgagcgtggccaaggttgacgtggccggccgaccgctggtgatcaaacgctacaacatcaagggctttgcccattggctcaagcgcttctggcgcccgagccgcgcctggcactcctggcgcgaaggcaaccgcctggccttcctgggttttgccacacccaagccgctggcggtgctggagaaacggtttctgtggttgcgcagccgtgcttacctggtcaccgaatacctgcctgggccagacatcatcgagcgctttgcgccgtatgtggagagcggcgaggcgccggagagcgagttgcaggcactggaccagttgttcgccgagttgatccgcgagcgcatcagccatggggatttcaaaggccataacctgttctggagcgacgggcgctgggcgatgatcgacctggatgccatgtgtcagcacggctcgctgtccagcttcgcccctgcgtatgccaaagaccgtgcgcgatttatgcgtaactggccgcagggcagtgcgctgtaccaggtgattgaccagcgcttgcccaaagaggcgggtgtcggcagttaaatctatcgcgggcaagcccgctcccacacttgatctgtgaacgcggtcaaaatgtgggagcgggcttgcctgcgatggcgcccgtccaggcgctgcattcagaactggtactgcgccccagcccccgcataccacgaccgccccggcgcggcttcgtaatagcgaccattgccgtcgcccacaattaccgaccccacatactggcgatccagcaggttatccaggcgcagggtctggtgaaaggtccagtgctctaccttttgctcaaaccgcgcgcgccagttgaagacgctgtaggccggtgcggcgcgttgttggttggtgtcttctacgtagaccttgctgcggtacatgccttcgatggcggtgctgacccagtcccgtggtttccagttcagttcggcgaacagggtggtttgtggcacgccggggaggtagttgcctttgtcgatggttttcccgttattggcgaagtcgctgtcgtattgagcttgcaggcgggtataggcgaggctggtgctccagtggtcgctcagttggctttcaacgcccagttcgaagccgcggcgcaatgtgcgaccggcgttctggtagctggtacggccaccgatggattgctgcaccaccagttcgtcctcggtggtgatctggaaaacggcggcgttgatccgcgtgttgttcagttgcgctttcacacccatttcatattgggtactttcagacggcctcaaaccgaagttgaagccctcggtgttgcccggcgcataggccagctcggcctgggtcggggtttcaaagcctttgcctgcgctgatgtagccatgcaggtcgggggtgaacgcatacatcacgctcattgaaggtgtgtttttctggtaggtcttgttgccgctggcgtcgccattgctgaggaactggtcgtcaacgtccatctgcatcgtgctgtggcgtacgccggcttgcagggtccagcggtcgagggcccagttggcttggatatacgggtcgaggctgcgagccgtgtcgatttcgtcgcggcgtagttggcctttcacgccgagggtgttgccgctgtagttctgatagccatggcggctgtcttcgctttggtcgaagtccaggccggtgatgatcatcagctcgccaggcgcgctttcgatgggctgcatccagcgtacgctgccgccgtagaacttacggtcaaattgcaccacgccaccgccgcgttcgttggcgggcgtgcccttggggatcgacaggtactgaatcacactacggcgcccggtataagcattgacctgcaaggtcgcgctaccgaaataccgctcgtaattcatccccaattgctgatgatcgatacttttgcgcgtgttgtagttcagcgtattggcgctcaccgaacgcgggtcggccttgtatgccgcccatgtctgccccagcggatcctgcgtaccgttctgctccaggctgctatagatcagcgccagcttgctgtcgtcatcgggctcgacattgagcttggcgaaggtctggtcgcggcgcgcgctgctgtgatcgcggtagccgttggtgtccatgcgcgaggcgtcgagcacaaacccggcgccattcgccgcgccctcggcgctcaggtggttcttgttcagcccgtcgctgcccaccagggtttcggcgccgatgcgcggcgggccttcgccgtcgcgggagaacatctggataacaccgccggcgttactgccatacagcgtcgccgccgggccgcgcagcacttcgatgcgttcggcggtatcgaggttgaaggtggcggcctggccctggccatccggggtactggcggggatgccgtcggcgatcagcttgatgccgcgcacgccgaatgctgaacgggcgccgaagcctcgggaagaaatttgcaggtcctgcgcatagttctggcggttttgcaccaccaggccgggtacgcgggacagggcttcggaggcgttgatgccgagttggccgtcgttgatctgttcgcggttgatgccgtccactgaatacggcaggtcgaacgtcgggctggcgctgcgcgagccggtgaccacgctggggtccaggatcaggggcgcattgtcggcctgggcggtgttacacaagcccagcagtaaggcaaggcaggttggagcagaaggagtcatgaaagggccggttggtagcgcgcaaatgaggggcgcaggcgaaaatgttacaagtttaacgactcgtcctctgatttgccgaaatccttaccgctgggcgcaatgggatgcttcctacgcctagcgtcgactgcgtaagcctgaagccttggttctgtggtgttaggttctcggtctttttaacaaacaagaagaatcaactatgcggactcctattctgaggttgctggtattgctgggaatatcgttgctcatgggcggctgcggcactacgaccacggtgctgcgtggcgatgacgtcactgttctggacctcaagaggaagaatacctactgcaactctgttccgcgtgtttatagcggcgtggtttatgacttgtgtgtcttgcatgggccgccgaactctgcaagtgatctctcgttgaatggtattccctgggtcattcttgatgtgcccgtctctgctgtcctggacacgctcgtgctgccctacacgatctaccgccaaagcgcggacggcagcatcgagctgcgctaacagcttcctaccgcttttaagctataatcccgccctttagctgtttcccgccccggcgggaaacacacttttttcaggcgcgatgcgcctgcatgcagactaaaagaggctagaccccagtggcattgacgattcttggcctgtccggcgcccttagccatgatccttccgcagccctgtatatcgacggcaagctgattgcggccgccgaagaagagcgcttcgtacgcgacaaacatgcaaagaaccgcatgccctacgagtcggcgaagttctgcctggaacaggccggcatcaagccttcggacgttgacgtagtggcgatcccgttcgccccgatcagcctgttcggcgaggcgcgctggcactacgccaagcgttactggtacgccccggaccgcgccctcgacgcgatcctgatgggcaaccgtcgctacaagcgctatcgcaacaagatcgtctggtgcctggagcaactgggcttcgatccgaagaaaatcaagatcgaaccggtggaacaccacctggctcacgcatccagcgcctaccactgctcgggcttccaggaaaaaaccgcgatcctgggcattgacggcaagggcgagtacgccactaccttctttggctacggcgaaaacggcaagatccacaagatcaaggaattctacgatccggactccctcggcggcctgtacggcgcaatcaccgagttcctcggtttcgagatgctcgacggtgagttcaaggtcatgggcatggcgccgtacggcgatgccagcaaatacgacttctcgcgcctggcctcctttgaaaacggcgagctggtgatcaacaccgactacgccaacgtcatcggcctgcgccgctacaaagagaagggcaagggtttctacttctcgccaaaactgatcgagtggctgggccccaagcgcgaaggcgacatcgccgacgagccgtatatccactacgcggccagcatgcaggcgctgttcgagaaactggccttgcagatgatcgaccattacctgggcgacattctcaaggacaccggcaagctcgccttcgctggcggctgtgcgctgaacgtcaagctgaaccagaaaatcattgcccgtgacgacgtcaaagaactgttcgtgcaaccggcctccggcgatgccggtaccgctgttggcgcggctgcctatgtgtcccacgctcgtggcgtaccggttgagaagatggagcacgtctacctcggcccgtcctacagcaacgaagacgtgattgccgcgtgcgccaagcacgagagcaagccgaactggcgcaagatcgagaacatgcctaagcgcattgccaagatcatggtcgacggcaacccggtggcctggttccagggccgcatggagtttggcccgcgtgcgttgggcggtcgttcgatcattggttgcccaagtgcgaccggcgtggcggatcgcatcaaccaccagatcaagttccgcgagcgttggaggcctttctgcccgtcgatgctcgacaccgtggccccgcagatgatcaaggtcgatcacccggcgccgttcatgaccttcacctttgaagtgtcggaagaatggaagacccgtgtgccggaagtagtccatgaagatggcacctcccgcgcccaggtgctcaagcgtgaatacaacccgcgctactacgacatgatgaaagagctggaagtgctgaccggcaacggcgtgtccctgaacacctcgctcaaccgtcgtggcgaagcgatgatctgctcgccgaccgacgcgctgaacatgttcttcggttcggacctgcagtacctgatcatggaagacatcctcgtggtcaaggacggcgtagacccttatgacgccgtggtttaaatgctgaaccgcttccagggctggcgtgaacgtggctgggcgcctgtcgaggccgaggtttacgcccaggcttggcagcgttacggcggcagcgtggcgacccatccccaggtgatcgaacgcttggccggcctggcgcagatacccgtgcgctacctgggctgggaacaaggtggtgaactcaagggggcaattgccacctggggacgcgacctggcgctgtccaaggacgtgctcaagcgcagcggcaagaaaggcctgtttgacctgggcaacgccgagatcattctgccgattgctgccgatgcgcaggtaccgttgcggcatcgtgcgcgctacctgtcgactttgaacgaggggcgcgtgagcaccctcaaaccccaggccgagcagttggccatggcgcgtactcccgaagacctgtcgaagaagtttcgctacaaccagcggcgtgaactgcgcctgttggaagaggcgggcggcgtggtacgggcggtcagtgagttctcgagcgtagagctggcggcgatttattgcgatctgttccagcgccgttggggcttcccggcggcgggcgcggcgcgtctggccgaggtgctggagttgctcaaggaattcctgttcggctcggtgctgtttctgaacgacgcgccgattgcagtgcaattggtgtatcaggtgcagtccaacgagtggttcagcgccgagtatgtcaacggcggcgtggaccctgaaacccgtgcattcagccccggcagcgtgctgagctttctcaatacccaaagtgcctgggaacaggcgcgggcggcgaacaagtcactgcgcttttccttcgggcgttccgaccgtgaatacaaggagcgctggtgcaacccggtgccggtgttcagtgtatgagccgtaaacagcaactgctcaagcgccatcggcgtaacaagcgtattgcgctattgatcggcgtgctggtgttggtcgccaccggcgtactggtggcctggtggttgccgctgatccttgcggtgctgctgtgggccgcccatgaagcctggtttgccgatcacctgttttactcgcccaaagacagctatgagtatgccttcccggccggcagcgaacagcccggcttgcacctggaggcgggccggctgctgctggatgcgccgttggcggcggatgaaaccctgatcgtcggcgttgagttgaaaagtacctggctggggcgtttcttcgaccctgcggtggacctgttgggcctggcaagcccggaccggcaagccttcgagcgcggcgtcgctgggcggcgttatctgaacctgaccggcgccgccgaagccttggccgcgggcaagctcaaattgcgcgggcgtttttgccggatcaagggccagccgacgctgtggcgctttcgccagccggactatcgccagcaacgtgtgatggtgatcgcgccccatgccgacgatgccgaactggctgcgttcagcctttacagccaggcgactgaaagttggatcgtcacgctgacggccggtgaaatcgaggccgagcattatcagcatatgggcttgcccaaggctgaagctgcgcgcctcaagggccgtttgcgggcctgggacagcgtcgcggtgccgcgctgggcgggcgtacccgaggcgcagtgcgtgcagttgggctacttctgcatgcagttgcaagccatgcaagccgcgccggatcagccgcaagcctcccgcgaagcggatttggccgatacgcggctgtttcgccagttcaatggttttgccctgcctggcgatgctgatggcgcgccgacctggcataacctgatcgccgacctgcgggcgctgctgctcaaggcgcggccccaggtcatcgtgttgcccacgccgttgctggacccccacgccgaccatatctgcgcccatgcggcagtgttggaagccttgcagggcctggcgtggcagcccgacacattgctcggctacgccaatcacctgcatgataacgaccgttggcccatgggcgattccggcgctggcgtggcgttgccgccgcgtttcgatagtgctgtggagctggtgccgtgcagtttcgccctcgccttgagccagcagcaggacaaggccatggccctgggcatgatgcacgacctgcagccgtcagcgccgttcaagcgtcgagtgcgtaggtggttgcagcaactgctggcgggccgtaggccgtcgccctatggcgagaacgaattctttcgcaaggccgtgcgccgtcacgagctgttgtgggtcctgaagcaggactgagagccgattgaaggcaggccggtatgcgcctgtcgccctttttaccgggctgcgtgcccgtagccagatcgctgcatggagagttatgaagcctcgtttcaaggttttgcagttacagccggactacaacgtcaagacccatgacttcgccgacttgggtgagcaaatcgtcaaatccctgccggctgagcgctttgaggtgacctccggatttctcagcgggcgcccgctgcctggccagcccctgagcgtggccgaacactcccactatttcgagctgccagagaagtccctcaagggcattcgctttggcgccatgtggcagatctacaaatactgccgcgagcagaagttcgacgtggtcatctgtaaccgcttcaagtcggtgaacatgatgttgtcgctcaaccgctggttgaagatcccgctgtgcatcggcatctcccacggctttggcgagtacgcccgtggttaccgtcggcgtcagacccaacgctgggtcagcccggcgtggcgctttgtcggtgtgtccgaagcggtcaaggactacctggtagacctcaactgcgggttcacccgtgagaacaccacctacgtcaccaacgctatcgacattccccaggcagaggctttgcagttgtcccgtgaggacgcgcgcaaggccctgggcctgcccatggatgcgcggatggtcggcgccctggggcgcctggtaccgatcaaaggtcatacccatctgctgcaagccttcgccacgctcaaggacaaataccctgaggcgcaggttgggattattggttctggccgtgccgaagccgacctgcgtgccgacatcgagcgcctgggcctgaccggccgtgcgcacttgctgggctttcgcgaagacggcatgaagtacgtgcgcggcttcgatatctggaccatgccgtcgctgttcgaaggcctgggcctggccttgctggaaggcatgagcggccatctgccagtgattgcctccaacggcccggcgatgctgccgctggtgcagggcgcgggcggcttgtcccacgacccgggcaacgtcgaacaactggctgcggccctggacacttacctggccttgagcgatgaacaattacgtgccaagggtgaagaggtgttccgctatctggaggccaaccacaccctcgacgagttcaagcacaagtacctgaccctgattgaaaccggtttgcgtgaagtaggtagagcatgaatcagccacaacccctggtctcggtgatcatcgcttcctacaaccatggccagtacatcgagcaaagcattcttagcgtgctggggcagacctaccccaatatcgagctgttggtggtcgacgacggctccagggatgacagcgtcgaacgtatccagcgcttgcaggccgagcacggctttgattttcaggtgcagcagaaccaagggctcagcgctaccttgaacggtgcgattgctcgcgccaagggcagcctgattgcgccgttcggctcggatgacatcatgttgccggaccgcatcgccacccaggtggcgtatatggacggcaagccgaaggtgggcatgtgtgctggcaatatcgagctgatcgacggggacggcaacctgcatccagaaaagaaacaacgtcgcgacgtgccatttcgccgtctggatttcgacgacctgttcctggaccgcaagccgtttccaccggcgccgaccatgctgatacgtcgcgaagtgctggaggaggtcggtggtttcgacccacagattcccctggaagacttgctgatccaactgaagatcacggcggcgggctataccatcgacgcccttgacgtggtgatggccaagtatcgccagcacgctaacaacacgtacaagaaccaccgctacatgatccagaacatcctcaagacctacgcgaagttcagcgagcacccggcctatgacgcggttcgctacaactttctgaactcgatgttcctcaagaccgccgaccgcgaccgcccgttggcgcgggagattctcaagcagatccctttgaagttctgggggcgcaagaccttgcgggggctggtgcggttgtatctggcaccgctcaaaaactgaaccgccaccgcaccctgtaggagcgagcttgctcgcgaagaacgtcaacgataacgcgtgcttcctgaataaacgcggtgccggtgagtttttcgcgagcaagctcgctcctacagagggggtttacaggctctggacctgttcgcggattttcgccgtggcggctgggcttgccaccgaggcgtaacctttgaccagttgttcgaagtgcgtttcgaacagccagttgcggtcctggggataacgctgcatgtggcgcaggttacgttggcgcaatgcgtaacgcagtgaagacgggtagatacgcaggtcggccacgtcgatcagggcgaattcaccatcgtccatcaacaacacgttacccaagtgcagcgaacggaagtacacgccgcgctcgtgcagttgcgccatgaaccggccaaagcgctccaccagtgactcacgcaggctgctgtccaggctttgcaacgcttggcgcaacgtcaggccgggcaacggcgtgtagcgcactgcgctgctggcgtcgttcaggcggtagagcccgaggatgtgcggcgtaggaatgcccagggtacgcagttgctcgctgttgctggcaaaacgctcggagtacgggttgaaactgccggaggtgtaccagcggcgtgggcggaacagcttgaggaagctgccgtcttccagacgcaggactttgggccccaggccatcggcttcaatcacatgggcattactgcacagctgttcaaacgcggcgggcttgaggttctgcaccttcatgcgcagcaggctgtgatggcgctgggcgaggctcaggccggtgatgattgccagggggatccacagcaggaaccaatgttccttgggccgtgacaggatccctccgccttcggtcaggcctgctccgatgccataggccagcagggacgatgccaggatgaacagcggctgggcgcgctccttcaaacctttgtataggccccagccgagcatgaaggcccaggggataaaaccaatgatgccgacgtaatagagcacgccgagggcaaagctgtggggctcgcgcagttggtatccatcggacaccgttaggtaaagctcggaatcgtagctatgcccgatccaagggtgctcggcgacgagctgcaatgtcatgccccacagctcaaggcggaacgagctgccacgtccagtgatcatttcggggaagaacaacaggagtccggcggcgcccagtaccatgccggtgattagtagtgcagcgcgtcgattacggctgacaaagctcatccaaagtatggccagcgtcagcgccaccagtggcgtgcgtgagccggtcgccagtacggccatggtcatgatcgtcagggctggtacgctgaaccacaacaccttcatgcgttgggtggtcatgcagacgtacagccagtacacggtgaagaacccaaaaagatgcgaactcaacagcgggttatcaagcgcgcccaggccgccgatcatgcgcaaaccgggcgaatagcccttggcgaacgccaccagattacccaggctcaccaccagcgcaatcaccgcagcgctgaagaagatcggtttgaacaattcgttgcggtaatgcagcaacagcccgcagccaccaaacagcatgaaggtattcagcggtcgcttgaacaggtcggtatcggaactgggcgcggggctccagagcagactggtcaacgcccaggcggagaacgccaggaacgcgatcgccaggggctcgcgcagcaggtccttgaactcccgagggcgcatgcacaacagaaacaaggtcggtacgctgaacaggatgtagacaatgcggtgcagtacattgcgattgccgacaaagaacagtgcactcaggagcagcagcaagccaacaggcaaaatccataggaccaggaagtcgaaaacgcgatttgagccataggtaaggcgcttggagtgcatacagtaaagccattccagaaagagaaagccgaccatcttaagctagtggctaagtaatgtcgccggtaggatccaaccgggccgcggcttacgccgggtgcaagtacaacagagaagctgtgctaaagtcagcctcctttttcaaaacgccgcgtgatatgaccgactccagtccgagcgcaagcccttcgagcttgaaaatatacttccgcctgctcagttacgttaagccctatatgggcttgtttgcgttgagtatccttggatttctgattttcgcgtcgacccaaccgatgctgggttacatcctcaagtactttgtcgatggtctctccaatccggaagctgtgctgttcccgaccgtgccctttttgcgcgacctgcaattgctgcaggcggtgccgttgctgatcatcctgatcgcggcctggcagggcctgggttcgtttttgggcaactacctgttggccaaggtctccctgggcctggtccacgacttgcgggtgcagttgtttaacaacctgctgacgctgcccaaccgctacttcgataaccacaactccgggcatctgatttcccgcatcaccttcaacgtgactatggtcacgggggccgcgaccgatgccatcaaggtggtgatccgcgaaggcatgacggtgatcttcctgttcgcctccttgctgttcatgaactggcgcctcacgttggtgatgatcgcgatcctgccgttgattgctgtgatggtcagtaccgccagcaagaaattccgcaagcagagcaagaagatccaggtggccatgggcgacgtgacccacgtggcctcggagaccatccagggctaccgcgtggtgcgcagcttcggcggcgaagtctacgaacagaagcgctttttcaaggccagccagagcaacaccaacaagcaactgcgcatgacccgcaccggggcgatctacaccccggcgctgcaattggtgatctactccgccatggccgtgctgatgttcctggtgctgtacctgcgtggcgacgcctcggcgggcgacatggtggcctacatcaccctggccggcttgttgcctaagccaattcgtcaactctcggaggtcagctcgaccatccagaaaggtgtggcgggcgccgaaagcatcttcgagcagttggacgaagacgttgaggtcgaccacggcactgttgaacgtgacaaggtcagcggtcgcctggaagtgcgtcacctgaacttcacctaccctggtaccgatcgccatgtgctcaaggacatcagctttaccgccgagcctgggcagatgattgcgctggtggggcgttcgggcagtggcaagtcgaccctggccagcctgatcccgcgtttctaccaccatgaaagtggtgagatcctgctcgatggcatcgagatcgaggactacaagctgctcaacctgcgtaagcacattgcccaggttacccagcatgtcactctgttcagcgataccgtgaccaacaacatcgcctacggcgacctggccggtgcgcctcgtgccgacgttgaagcggcggcggcggatgccaatgccaaggacttcatcgatcagttgcccaagggctttgatactcaggtgggcgagaacggtgtgttgttgtccggtggccagcgtcagcgcttggcgattgcccgtgcgttgctcaagaatgcgccattgctgatcctcgacgaggccacctcggccctcgataccgagtccgagcggcatatccaggcggcactcgataaggtcatgcaaggccgcacgactctggtgatcgcacaccgcctgtccaccatcgagaaggctgacctgattctggtgatggacgacgggcggattgtcgagcgtggtacccacggcgagttgttggcgcagaacggttactacgcccgcctgcatgccatgggcctggatgcaccggtgcaggcggatatcacctgatccacccggcatcacggggtaaatgaaatgtaggagcgagcttgctcgctcctacagagagcaaatcccctcccacatttgccctgcggtggtcgcaagccatcgcaaaccctgtgctaatatcgcgcccctgttcattttgtatgtgggttgctccatgaagttgtccatgccgcgattcaatcaagccgctgtcttggtggtcggcgatgtcatgctcgaccgttactggcatggtggtacctcacggatttcccctgaggcgccggtgccggtcgtcaaggtcgagcaaatcgaagaccgcccaggtggcgctgccaacgtcgcgctcaatattgccgcgctcggcgccccggcttccctggtaggggtgaccggcgacgacgaagcggccgaaagtctggccaacagcctgcagggtgccggtgtgcgtgcgctgttccagcgcatcgcccatcagccaacgatcgtcaagctgcgggtcatgagccgtcaccagcagttgctgcgtatcgattttgaagaacccttcgccaccgacgccctggcccttggcgaccaggtcgacgcgctgctcgacggtatcaaggtgctggtgttgtccgactacggcaaaggcgccttgcagaatcaccaggtgttgatccaggccgccaaggcccgcaacattccggtgctcgccgatcccaagggcaaggacttctcgatctaccgaggcgccagcctgctcacgccaaacctcagcgagttcgagaccatcgtcggcgggtgtgccgatgagcacgagctggtgagcaagggcgcggcgctgatggccgatctcgacttgggcgccttgctggtgacccgtggcgagcacggcatgaccctgttgcgtccgggccacccggccatgcacctgccggcgcgtgcccgtgaagtgtttgacgtcaccggcgccggtgacacggtgatttctaccctggcagcctccattgccgccggtgaggagctgccccatgccgtggccctggccaacctggcggcgggcattgtggtaggcaaactgggtactgccgccatcagcgcaccggaattgcgccgcgccatccagcgttccgaaggctcggagcgcggtgtgctgggcctggagcaattgctgctggcgattgacgatgcccgcgcccacaacgaaagcattgtgttcaccaacggctgttttgacatcctgcacgccgggcacgtgacgtatctggaacaggcaagcgctcaaggcgaccgcctgatcgttgcggtcaacgatgacgcttcggtcagccgcttgaaaggccctggccgtccgatcaacagcgttgaccggcgcatggcggtacttgcgggtctgggggcggtggactgggtgatcagcttttccgaaggcaccccggaaaacctgctggctcaggtcaagcccgacgtgttggtcaagggcggtgactacagtgtcgaccaggtggtgggtgcggacatcgtcagcgcctacggtggcacggtcaaagtgctggggctggttgaaaacagctcgaccaccgcgattgtcgagaagatccgcaacaacgagtgataccccgtggggcgagcctgctcgcccctagcttttcttcggcacgatcttgcgcagcatctgccgcgccttgccggtcaagcgcttgagttttgagtccttttccggctctgccaggccctgctgcctgagccagtccttccagcgaattcgctcatcacgcaccagccagccctcttgctgggcaaaactttccgccaggtacaggccgcgtgtgctggccgggtacagctgatccttcttgacggtatacaactctgccagtggctcgccgtctttgagcggcatcaagtacaagtccggacgctggcgatccaggcgcgccaccaactggtcaccctccaaacgctcatccacatgaaacaaactgagggatttggcttccttcggcacttccaggcgcaggtcataaatcaattgcagcgaggcggtcggcaagtgcacgtaggcccgtgggcgctcgatcagttgcatggtggcgcagcgcaccgggcgcgcggcgccggacagcgggctgagacgaaacggcagggcctcgcggtaatgcagggcagcggagtagggcgccggcagccaagtgtcgttgaagcgcccgcccagccagccttcgggggtttcgagcaggcactcctcggcgatttcctgaatggcggtatgcagtggcaggttcagttcatgggccgggacgtagccggagatcagcttgagcaccacgtcgccacggtcctggcggcgttggcgcaccaacacccagtagtccttgttttgccaatgcagggtcaggcgcaccgagacgccgaggttcgccagttccagggcgaagcgttcggcatctggcacctcgaccggcttgcgccgttgcagggtctgggcgaagttgagcggcatgccgacgctctggtagctcaggccttcgggggtggcttcgacgtgcagcggcagtgtcttgaagttgctggggttctttcttatgagcgtacgcggcatgtcggctccttcttgcgacgggggtcggccgcgtgggcggcatcagagttgacgaatgacccgggcagcagttgctacgttatgggccaggtgcagcggattaatggtcccgacaatagcactggcgacgcccgtttgcgcgaacaacaaggtgaaactggcctgaattggatccattcccggttccaggcatacatggccgctggccagggcctttttcaccaggatgcccttgccgtgggcggcggcatagtcgatcacggccttctcagcctgttcgttgaggttgtaggtgaccatcgcgcagtcgccctgttccagcgctttcacgccgccctcgacggttttgccggagaagccgaaaccgcggatcttgccgtctttcttcaactgcgccagggtctggtaaacctcgcaatcgttgaggatatgcaagtcgttgccgtccgagtgcaccagcaccaggtcgataaaatcagtttcaagtcgtttcaggctgcgttcgatcgacattcgcgtatgggccgcgctgaaatcgtgatgggacacgccattggcaaactcttcgccaaccttgctgacgatgacccagtccttgcgctggtcacgcagcagcggccccagccgctcttcgctcatgccataggccggcgcggtgtcgatcagattgatgcccagctcgcgggcctggcgcaacaacatgcgggcttcgtcgtcgccagggatctgaaagccgttggggtatttcaccccttggtcgcggcccaacttgacggtgcccaggcccaggggcgacaccagcaggccggtgctgcccagggggcgatacaggtcgtgcagggttggcaggctcatggcaacagttgctcccaggctggttggccgattgccggttttggcaactcgggcagggcggcgctggcgcttggctggatgccatcgcgctccagggcttggagtacgcggtcggcgaagtccggcgccagcgccagtttggttggccagccgaccagcaagcggccgtcttcggcgaggaaggcgttgtcgggacggctcagccccgattgcagcggctcggcgcgatccacccgcagggtggcccactgggtctggctcatgtcgatccagggcagcagttgcgccagctctttctgcgcggtggcgatctgttgttcaggcgtacgcgccacgccgtcagcctcggcgatatcgccgcccatgtaccacacccagttgccgtcggcggccgggtgggtggtcacggtgatccgtggcttggtgccgccgcccaggcaatgggcgtacagcggcttgaggccagggcctttggcgatgatcatgtgcagcgggcgtttttgcatggccggctggctatggcccagggctgcgagcacatccgccgtgccgccgccagcgctcaagacgatgcgctgggcgcggatctcacggccatcgactttcaagcccaccagggtgtcaccgtccagcaacggttcgatgtgctgaccggcgagcagaccgtcgccagccaattgcgccaggcggttgatcaggctgggcacgtccaccaccagctcggccaggcgatagaccttgcctttgaagcgagggttctgcagcgccaggggcagttcgtcgcccttgacctgatcgacgcggccacgcacggccttgctggcgaaaaagctggtgaggttgccggcaatcgtgccgggcgaccacaagtaatgcgcctgggacagcacgcgcacgccggacaggtccagttcgccgttgccggccagggcttcacgccagcggcgcggcatatcggcaatggcttcggaggcgccggtgagggcgccatgcagggcgtatttcgcaccgccgtgaatgatgccctgggacttcaggctttgcccgccacccagggtggcgctttccaccagtaccgtggaaaacccctggctgcgcaggcgcgcattgagccagaggccggcaaccccggcgccgacaatcagaacgtcggtggaaataacggatggcatcggcgacctcagtgttcaagacaagaggcgcagtatacaggctgttgagtggcggtcagtgcccggcggttttcgagaacagctgaatcaccaccacgcccagcacaatcaggcccatccccagcatcgccggcacatccagcttttgcccgtagatgaacagcgccgcgatgctgaccatcacgatgcccatcccggcccataccgcgtacgccacgccgaccggcacggtgcgcaccaccagggtcagcatccagaacgccacgccgtaaccgacgatcaccagcaacaacggaataggggtgctccagcctttgatggctttcatggaaacggtggcgatcacttccgagcagatggcgatggccaagtaatagtaggcggcattcatggggcaatcctcgaggtgatgcgcatttgataaggtcggcattctagaggttcgccagatggggtaaagtcattacctatctagaattgagatgggttgagccatgagcgtgcaatgggatctggagcagatgcgcctgtttgtcagcgtcgccgagcagctttcgttttctgccgtggcccgggggcagcgaaaggcgcaatcggcggtcagcaatggcattgccctgctggaggctgacttgggcgttgtgctgttcgaacgtagcagcggccggcaaccgcgcctgaccgaggccggcagtgtgttgctggaggaagcgcgtgaggtgctgcgccagtgtgagcgcctcacgggccgggccttatcgttgacccgcggcgaggaagcctgcctgcgcctggcccaggatgaggcgatgttgttccagcctgtgctcgacagcctggaggcgctggccgtgcactacccgctgctggaggtgcagttgtccagcgcagcccagggcgatgtggcgcgcaagctggtggagcgcaaggcggacctggggctgctgttctatcacgaccagattcccgaagccctggagcgacgggtggtgggcagtgtagaaatggtcacggtgtgcggagtcaatcacccgttggccaaggagcagtacgtgacgtgccaacacctggcccagtttcggcagttgctgatgtcgacccagaccagcgtctaccccggcagcgaggcggccagccccctggtgtggcgcgccgacagcttctacgtattggccgaatggctgatgagtggcctgggctgggcctggctgcctcggcatatcgtgcaatacccgacctaccagcaacagatggtcgaattggccagcgaatggactccgcccgccctggtggtggaactggtgtggcgccgcgacgagcaccttgggcccgccgcgcgcttcttggccaaacgttttgccgagtgcttgcaggcgatcgactgaaaaagccgataaactccgccgccatgaatagaactctctacagctgtctgttttacctggcgctgccgttggtggctttacgcttgtggttgcgtgcgcgcaaagcgccggcctatgccaagcgggtgggcgagcggttttcctacggcttgccggtgatgcggcccggcggaatctgggtgcacgcggtgtcggtgggcgaaagcattgccgccgccccgatgattcgcgggttgatggcgcgttatccacagttgccgatcaccgtcacctgcatgacgcccaccggttccgagcgtatccaggcactatttgccaatgagccgcgcatccagcactgctatttgccgtacgacttgccctgtgccgccaagcgttttctcgaccgcgtgcagcccacgctggcggtgatcatggaaaccgagctgtggcccaaccatatccatgcctgcgcccagcgcggtatcccggtggcgctggccaatgcgcggttgtcggcgcgctcggccaaggggtacgcgcgatttgccaagctgacggcgccgatgctggcagacatgagcctgttcgccgtacagaccgagaccgaggccgaacgtttccgcagcctgggcgcacgccctgaaaccgtggaagtgaccggctcgatcaagttcgacctgagcatcgaccctcagttgacggcccgcgccgccgccctgcgtgaacaatggggcgccagcgagcgtccggtctggatcgccgcgagtacccacgaaggtgaagacgacgtggtgctggcagctcatcgccagttgctggcgaactatcccaatgcactgctgattctggtgccccgtcatcaggagcgctttggccccacgtttgagcgctgtgtgcagcaagggtttgccaccgtgcgtcgctccagcggcgagccggttaccgagcacacctcggtgctgcttggcgacaccatgggcgaattgctgtttctttacgccctggccgacagcgcattcgtcggcggcagcctggtgccgaccggcgggcacaacccgctggaaccggccgcgctgggtaaaccggtgatcatgggcccgcatgtcttcaacttcctcgacatcaccgcgatgatgcgcgacgccggggctttgcgggaggtggacgatgccgatgggctggccgaagcggtgcgacagttgtttgagttgcctcaggacgcacgcaagatggcgcaggcggggctcaaggtgatgcaggccaaccagggcgcgttaaagcgtttactggatggcttggacaaactgatcaaacactgacaacacccacccaatgtaggagcgagcttgctcgcgaaaaacgtcaacgataacgcgtgtttgctgaatgaacgcggcgccnnnnnnnnnnnnnnnnnnnnnnnnnnnnnnnnnnnnnnnnaaaaacgtcaacgataacgcgtgtttgctgaatgaacgcggcgcctgtaagtttttcgcgagcaagctcgctcctacagagtcaagccaactcccacattttaatagccggggcgggccttgagctgttcggcagcggctttggccaggtccggcggcaggaagtccttgtccgggttgtagtcggccttgagatagcgcgccagatcctgcaagtcccctgggttgagcgtgcccgccgcctgcttcaagcgcaggttgtcgaggatgtaatcgtagcggctgttgttgtagttgcgcaccgacgcgtacagctggcgctgtgagtccagcacgtcgacgatgttgcgcgtacccacctgatagccgatttccgtggcttccaccgcgctctggttggagatgatcgactggcgacgcgcttgcacctgctccacatcggtgttgactgcacggtgcaggttgcgggtgttttccactacttggcggcgcaggccctcgcgttgctgctcggtctggtcgaggcgcgaataggattcgcgcacttgcgaactggtgaggccgccgctgtagatcgggatgttcaagcgcaggccgacggtgcgttgcgacacatcgccgccgtacgggataggcaactgattcgggttgctgaagcccagggcgtcgttgtcgcctttttcgtattgcgcaaccgcgtcgagggtcggcaagtggccggccttgcgctgccgaagggtttcttctgcggcagttaccgcgtaattgctggcgagcaggttgaggttctggcgcccggcggtttcgacccaggccttggcgtcgttcggcgccggcggcagcaccggcagcgtgtggacgatgccctggatcgagttgtactggcggttggtcagggtgatcagcgcttcgaaggcgtcgtccacctggcgctgggccaggatgcgattggctcgggcagtgtcgtagctggcctgggattgcagcacatcggtcttgtccgacaggcccacatcgaagcgttcgttggactggtcgagctgacgcttgaaggcgttttcttcggccttggtcgacgccaggttgtcctgggcacgcagcacggcgaaatagctttcggcgctttgcaaaatcaggttctgctccgaggccgacagttgcagcgaggcttgctcgttgaccgcgtgggcggcttgcagctggaaccagcggtcggcgcggaacagtggctggctcaaggtggcccgccaggagtgggcgtcacggttggccgtggcggccggctggtcgatctgggtgcgcacgttgttgctatcggcgccggcggacaggttcggcagcaagcccgcgcgggcctggggcaccacttctttttgcgcgccgtactgggcacgggcagcggccaggtcggcgttgttgttcgccgcttcctgatagacgctgaccaggtcggtgttggcggacaagggcgcttcagctgcccagaccagtccgttggtcgcacaagacacggcaacagccagtgagagtttgcgcagcatgaggcgatccctagtatgaatattacggtgataattcagcgcccaaggctaaggctggccatgcctggcgtcaagccttgaggccgtgcccgagtgtagtagcggggcctgcgcacaacaatcccacgatcacgccattcatcacgctgaataaaccgctattggcaatttgcccacgccatggtctagactggccgcgttcttgtcggggtgccttgttggaaggctgagatcggtaaataccggatcccgttgaacctgatcaggttagcgcctgcgtagggaacaagatttctcgtcacccggcgagtcctcttgtgcttcgtccgggatgttgttcgacaatcgaacagccctcgtgcgccaagcacagcactggttccagtgcgtccgtccgtcacaggttcgctccgacaaaaatccaccgcctggataagttggagagcctgtgatgagtacaaaactaaaaaataccgtgcacctgagtgaatcggccaaggtcgactccggctccgtgcagccgtttacccgctcgcaaaaaatctacgtgcagggctcccgcccggatattcgcgtgccgatgcgtgaaatcagcctggacgtgacccccaccgatttcggcggtgaaatcaacgcgccggttaccgtctacgatacctccggcccctacaccgacccgaatgtgattatcgacgtgcgcaaaggcctggccgacgtgcgctcgccgtggatcgaagtacgcgacgacaccgagcgcctgcccggtctcacctcgcacttcggccagcagcgcttgagcgatgccgagctgaccgccctgcgttttgcccatgtaaagaacccgcgccgcgccagggccggtgccaacgtcacgcagatgcattacgcgcgcaaaggcatcatcacggccgagatggaatatgtcgccatccgcgaaaacatgaagcttgaagaagcccgtgccagtggcttgctggatcagcagcacgccggccacagcttcggcgccagcgtgccgaaaatcatcacgcctgaattcgtacgcgaagaaatcgcccggggccgcgcgatcatcccggccaacatcaaccacaccgagctggaaccgatgatcatcggccgtaacttcctggtgaagatcaacggcaacatcggcaacagcgccctgggttcgtccatcgaagaggaagtggcgaaactcacctggggcattcgctggggctcggacacggtgatggacctgtccaccggcaagcacatccacgaaacccgcgagtggatcatccgcaactcgccagtgccaatcggtactgtgccgatctaccaggctctggaaaaagtcggtggcgcagccgaagacctgacctgggagctgttccgcgacaccttgatcgaacaggccgagcagggcgtcgactacttcaccatccacgctggggtattgctgcggtatgtgccgctgactgccaagcgcgtgaccggcatcgtctcccgtgggggttcgatcatggccaagtggtgcctggcccaccacaaagagaatttcacctacacgcatttcgacgaaatctgcgaaatcatgaaggcctatgacgtcagcttctcccttggcgatggcttgcgcccgggttcgattgccgacgccaacgacgccgcgcagttcggcgaactggaaaccctgggcgaactgaccaaaactgcctggaagcacgacgtgcaaaccatgatcgaaggccccggccatgtgccgatgcagctgatcaaggagaacatggataagcaactggaatgctgcgacgaggcgccgttctacaccctaggcccgctgaccaccgacattgcgcccggctatgatcacatcacttcgggtatcggcgcggcaatgatcggctggttcggttgtgccatgctctgctacgtcacacccaaggagcacctgggcttgccgaacaaggacgacgtgaagaccgggatcattacctacaagatcgcggcccacgcggccgacctcgccaaaggccaccccggcgcgcagattcgcgataacgccttgagcaaggcgcgcttcgagttccgctgggaagaccagttcaacctcggcctggacccggataccgcacgttcgtaccacgatgaaaccttgccgaaggattcggccaaggtcgcgcatttctgttcgatgtgcgggcctaagttctgctcgatgaaaatcacccaggaagtgcgtgagtacgcggcgaaccagcgtatcgatgcggtggatgtggatgtggccaagggcttggccgagcaggcagagcggttcaagcaggaaggtagccagctctacaagaaggtctgatccttaggcggcggtgtctgcaccgccgtcatcgcgggcaagcccggctcccacagttggccgagtggtacacagattttgtgttcacaaacggtcccctgtgggagtcgggcttgcccgcgataacgatccgacaaacacccaatctccctctgcaataacacccttgaaccttcaaccgatcaacggcgtgccggcaccagttcaggcttgatcacaccggtgaggcgcgtatagggcagggtgatttcgatcagcccctgtgcgtaaggggcgatggtgctgacgttgtacttgagcaccacgccgccgctggtcagggccacgttcggggttttctgaaacggccagctcttcacgaattctgggtcgcggtccatcttggtgctgatcaaccagctgttgtgggcaactttagcggtattccagaaggcttgctcctggccgggcaacagcatgtcggccagggtcagttccttatgcagaatccgtgaatagttgataaacccgcggcctggctcgccgtgggcgacacctgtgtccaggtagctggacacttcaacgatcaccagtccgtcatgctggtcacgtaccttggcttgcaagtacatgccgtggcggtctggcgactcacgcaggaaggtgtttcgataggcgttcaggctcgccggcacgctggcgccaggcgtggtgcgggtcatttgcagcaggcgctgttccaccaggctgtccagttgtggctcggcagggaaatgcacggtgtcgatgttcaccagcgggcaggccgggctgtcgcagccgggcttgatctgctccgacttgtcggtggtaacgtccagcggcttgagataggcgggttggaacaggctctggcaagcacccagggtcaaagcaatacaggccacggaggcgattcttaaaagcgacatgtgtgtccttcgtaaatcgatggaaagcgaaaagagtagcgcttggactgccaacgtggccgccagttcgccactaaactgattgcagtgagtttgacgttcgccgcctctcccggcaaccgcaaaggggctgcatcaacgggcgtcggcgcgttaggatggcgcccattgcacgagcttaacgagggacaccatgaccgacatcgcgaagtcgacaccgaacaagatcgagattgttcagcgtgacaatgcctataaaggcttctacaagctcgatcgcgtgcaactgcgccatgaaaaattcgacggcggcatgagccgggtgatcaaccgcgaagtgttcgtgcgtcatgacgccgtgtgcgtgctgccctacgacccgcagcgcgatgaggtggtgctgatcgaacagttccgcgtcggcgccatgggccgtgccgataacccctggctggtggagatggtcgccggcctgattgacaaggatgagcaacccgaggaggttgcacaccgcgaggccgaagaggaagctgggctgacattctccgcgctgtggccgatcaccaagtatttcccgtcgcctggcggcagtaccgaatttgtccacctgtacttgggccgttgcgacagctcgggcgcgggtggggtccatggattggaagaagaagcagaagatatccgcgtcaccgcctgggccttcgaagatgccttgcaggcggtgcgcgacggcaagatttccaacgcagccagcattatcgccctgcaatggcttgcgcttaatcgcgcggaagtgagggggttatggcagtaaaggcacgggaacgttatcgagttgacctgatcgggctgcaagcggcctgcgaggccaactatgcgcggctgatgcgcctgctcccggacatgcgccacgccccccaggcgcggcgcattgctgtcacccacggcgaccagatgctcggcgtgctgaccctggaagtcattctcacctgcccctacaccaccaccctgcgggtacgccaggagcacagcctgccgtggttgccggtgccgcaattggaagtgcaggtgtaccacgacgcgcgtatggccgaagtgatcagcgccgaacatgcgcgacgctttcgcagcatctatccttacccgaacgtgttcatgcaccagcccgatgagaaagcacagctcaatgtgttcctcggcgaatggctcagccactgcctggccttgggccatgagtttgaagtggtgcggtagatgtgaactgcgtctgtttccttgggtttcctctttgtgtcctgccccagcataatcgcgccaattatccattcctgtagttgccagggagagcgccttgccgagtgtatccgccgtgaatcctgatgccgtgttgctggtgcagttgtccgacagccatctgtttgctgacgctgacgccacgctgctgggcatgaacacccgtgaaagcctgcagcgggtagtcgagctggtgcgcgcgcaacagccggccatcgacctgatactggcgaccggcgacctgtcccaggatggcacgctggcgtcctaccagcagtttcgcgatttgaccgcgtcccttggcgctccggcgcgctggattcctggcaaccacgacgaaccgcaggtcatggcccaggctgccatgcacagtgatttgctcgaaccggtggtggatatcggcaactggcgtatcactctgttggattcggcggtaccagggtcggtgccgggctacctgcaagacgcgcaactgcaactgctggcgcaggccttgagcgaggcgccgggccgccatcacctggtgtgtttccaccaccatccggtgcccatcggctgtgcgtggatggaaccgatcggcctgcgcaaccccgaagcgctgtttgccgtgcttgagcgctttccgcagaccaaggcattgctgtgggggcatgtgcatcaggagatcgacagcgagcgcgacggtgtgcggctgctggcttcgccgtctacctgtatccagtttgcgccgggaagtgaggatttccaggccagcgagcaggcaccggggtatcgctggttgcgcttgcatggcgacggacggttggaaacgggggtggaacgggtcaaaggcttcgcttttacggtcgattacggcagcaacggctattaaggcctgcaaacactgatcaaaaggtgggagctggcttgcctgcgatgacggtgtacctggcgctgactcgttgactcaatcgccgccatcgcaggcgagccagctcccacattgggtccgcttctgcctgcattccctgtaaactgcgcctctttggcctcagcacggagagcccggcatgtccgcttcgatcctgtatatccacggtttcaacagtgcgccggcttccaacaaggccagccagttgaccactgtgatggatgcccttggcctgtccgaccagctgcgtgtgccggcgctgcatcaccaccctcgtcaggcaattcttcaattggagcaagcgattgcgcaactgggccggccactgctggtcggcagctcactcggcggctactatgcaacccatcttgccgaacgccatggcctcaaggcgctgctggtcaacccggcggtcagcccccatcggatgttcgacggttacctgggcacccagaagaacctctacaccgatgagacctgggaattgacacaggaccacgtcacggcgctggccgagctggaagtaccggctccccaggatgccgcgcgttatcaggtgtggttgcagaccggggacgaaaccctggattatcgcctggcccaacagtattaccgggcctgcgccttgcgcatccaggccggtggcgaccatggttaccaggggttcgccgagcaattgccggcactgttgtgctttgccggtattggcgcagatcagtttcaatccttcgatttttcgtcactgtagaaaatcgcaggtcactttttaatcgaacgactcacgacgagaccccatggccactcccagcgctagctcttataacgccgacgccatcgaagtcctctcgggcctcgacccggtgcgcaaacgccccggcatgtataccgacaccagtcggccgaaccaccttgcccaggaagtcatcgacaacagcgtcgacgaagccttggccgggcacgccaagtcggtgcaagtcatccttcacgccgaccattccctggaagtgtccgacgacggtcgtggcatgccggtggacattcaccccgaagagggtgtgccgggcgtcgagctgatccttaccaagctgcatgccggcggcaagttctccaacaagaactaccagttctccggcggtttgcacggcgtaggtatttcggtggtcaacgccctgtccaccctggtgcgggtcaaggtcaagcgcgacggtaacgagtaccagatgaccttcgccgatggctacaaggccaccgacctggaagtgatcggcaccgtgggcaagcgcaacaccggcaccagtgtgtactttgcgccggaccccaagtatttcgattcgccaaaattctccatcagccgcctcaagcacgtgctcaaggccaaggctgtgctgtgcccggggctgctggtcagctttgaggacaaaggtaccggcgagaaggtcgagtggcattacgaagacggcctgcgctcttacctggaagattcggtcagcgacttcgaacgcctgcccaacgagccgttctgcggcagcctgtcgggtaataaagaagcggtggactgggcgctgctgtggttgcccgaaggtggcgacagcgtgcaggaaagctacgtcaacctgatccccacggcccagggcggcacccacgtcaacggtttgcgccaaggcttgctggatgccatgcgtgaattctgcgaataccgcagcctgttgccgcgcggcgtcaaactggcgccggaagacgtgtgggagcgcatcgcgttcgtgctgtcgatgaagatgcaggaaccgcaattttccggccagaccaaagagcgcctgtcgtcccgcgaggcggcggcgtttgtctctggcgtggtcaaggacgcgttcagcctgtggctcaacgagcaccccgagctgggcctggccctggcggaactggcgatcaacaacgccggccgtcgcttgaaagccagcaagaaggtcgagcgcaagcgcatcacccagggcccggcactgccgggcaaactggccgattgcgccgggcaagacccgatgcgttccgagctgttcctggtggaaggtgactccgccggcggttccgccaagcaagcgcgggacaaggagttccaggcgatcctgccgttgcgcggcaagatcctcaacacctgggaagtcgatggcagcgaagtgctggccagccaggaagtgcacaacatcgccgtggccatcggcgtcgatccgggcgcggcagacatgagccagttgcgctacggcaagatctgtatcctcgccgacgccgactctgacggcctgcacattgctaccttgctgtgcgcgttgttcgtgcagcatttccgcccgttggtggatgccggtcacgtctacgtcgctatgccgccgctgtaccgcatcgacctgggcaaggaaattttctacgccctggacgaagccgagcgcgatggcatcctcgaccgcctggtggccgagaagaaacgcggcaagccacaggtcacgcgattcaagggcctgggtgaaatgaacccgccgcaactgcgcgaaaccaccatggacccgaacacccggcgcctggtgcagttgaccctggaagacttcgccgccacctcggaaatgatggacatgctgctggcgaagaaacgcgctggcgaccgcaagtcctggcttgaatccaaaggcaacctggccgaggttctgggctgatgcgcacaggcttcgccctggcgatcctgatgttgagcgggctggcggtcacccaggtggctgccgcgcccatggcagagctcaagctggtctcggaacacccggtggacggcatgcgcggcgggaacctgtcgggcctggcgttatgtgacaacgagctgtggacggtttcggaccgcgatgatgaccagatctaccgcctggatacccgtgcgccggcctggagcgcgcaagcgctgaagatcgacgtgccgcccgtgcccgagtccggcctgccttggggcttgcgttcgcgcaccaaggccgcttcgtttatacgcggcggtgacctggactttgaaggcatcagctgtgatgccgcaggcaaccgctacattgtcagcgaagcccatgccgcggtgttgcaggtgccggcggcgggcgcgcccgagtggttgaaaatcgcgccgggcatggtgcgtgaagccagggccagtggcatgttgctgcactttaatgccttgttcgaaggcctggcggtgaaccctgaaggcaatcagatctggctggctgccgagcgcgaacgccgtggcctggtctcgatcaagcgtgggcagagcgtatgggattgcgatggtcgttgtgtattgttgagcgaggccggccaggaagtgcagccggcgcagttccccaacgccaaggccgtgtccaaggactttgccgacttgtcgctgttcaacggcaagctgtttaccctggagcgcaatgcgttccagatctgccggcgcgacccgctcacggccaaggttgagcagtgctggtcgtttgccgacgaagccctgacgccgcagcgacgttacccccagtcgtatggcctggctgaagccctgttggtggatgccgacggtgcctgggtcgggatcgacaacaatttcggcccgcgtgccgatggtgaaaaacgtccgatggtctatcgtttcgccgccccggacggcggctggagtgcccagccatgaatcgagatttttttgaattgaatcagcgcagcggcagttccgctgcgccttaccccatgatgaggcccgcatgagtgacatcctcgcagacagtttagatggcgtagaacgccggtcgctggctgaattcaccgaaaatgcctacctcaactactccatgtacgtgatcatggaccgtgccttgccgcatatcggcgacggcctgaagcccgtgcaacggcgcattatctacgccatgagtgagttgggcctggacgctgattccaagcacaagaaatcggcgcgtactgtcggtgacgtgctgggtaaattccacccccacggcgattcggcgtgctatgaagccatggtgctgatggcccagccgttcagctaccgctataccctggtggacggccagggtaactggggtgcaccggatgaccccaaatccttcgccgccatgcgttacaccgaggcgcggctgtcgcgttattccgaagtgctgctcagcgagctgggccagggcacggccgactggggcccgaactttgacggcaccctcgacgaacctctggttttgccggcgcgtttgccgaatatcctgctcaatggcaccaccggtattgcggtcggcatggccaccgacgtgccgccgcacaacctgcgcgaagtcgccaccgcctgcgtgcgcttgctggatgagcccaaggctacggtcgagcagctgtgcgagcatatccagggcccggattacccgaccgaagcagaaatcatcacgccgcgcgccgacctgctgaagatgtacgaaaccggcaagggctcggtgcgtatgcgcgccgtgtaccacatcgaagacggcgacattattgtgaccgcgctgccgcaccaggtatcgggtgccaaggtgctggagcaaatcgccgcgttgatgcaggccaagccgtcgaagttgccgcaagtgaccgacctgcgtgacgagtccgaccacgagaacccgtgccgcatcgtgatcatcccgaccaacagccgggtggatcatgaagtgctgatgcagcacttgtttgccagcaccgacctggagtccagctaccgtgtcaacgtcaacatcattggcctggacggcaagccgcagttgaagaacctgcgcaatctgctggtggaatggctggaattccgcgtgcagaccgtgcgtcgccgcctgcaatttcgcctcgacaaggtcgagcgccgtctgcacctgttggacggtttgctgattgcctacctcaacctggatgaagtgattcatatcatccgtaccgccgagcacccgaaggccgagctgatcgcgcgtttcgagctgagcgaaatccaggcggactacatcctcgacacccgcttgcgccagttggcacgtctggaagaaatgaagctgcgcgacgagcaggatgcgctgctcaaggaacaagccaagctgcaagccctgctgggcagcgaagccaagctcaagaagctggtgcgcagcgaactgatcaaagacgcagaaacctatggcgatgaccgtcgctcgcctatcgtcgagcgcgctgaagccaaggcgctgaccgaaaccgagctgttgcccaacgagaaaattaccgtcgttttgtcggaaaagggttgggttcgctccgccaaagggcatgatattgacgccaccggcctttcgtacaaagccggtgatggcttcaagaccgctgccgcggggcgctctaatcagtttgcggtgtttatcgattcgacggggcgcagttattcggtgccggcccacaccctgccgtctgcacgggggcagggcgagccgttgaccgggcgccttacgccgccaccgggggcgaatttcgagtgcgtgctgttgccggatgacgattcgctgtatgtcatcgcctccgacgccggttacggcttcgtggtcaagggcgaagacctgcaggccaaaaacaaggcgggcaaggcgctgttgagcctgccgaacaacgccaaggtgattctgccaaggccggtggaggaccgtgaaagcaactggctggcgtcggtgaccaccgaagggcgcttgctggtgttcaagatcagcgacttgccgcagctgggcaagggtaaaggcaacaagattatcgggattcccggtgaccgggtggccagtcgcgaagagtatgtgactgacatcgccgtcatcccggaaggctctaccctggtgctccaggctggcaagcgcacgttgtcattgcgccctgacgacctagaacactacaagggtgagcgtggccggcggggtaacaaactgccacgaggtttccagcgagtggatgccttgctggtcgaaacgccggtttaatcggtactagaggcctcgatctacgatttaacgcgtagatcgatgctttcgcgctggagtcatggcgcatattcacggatgatatggcctttccagcgccggcgtggccgagcgtgttcaggttatttttagtattacattgtggttcgccttgtggcagccacttggatgggatgatgactgctccacgccttcctctatttttgatgctcgctggccttttggggttggcgggttgcagcacacaccaacccgtgtcgctgtaccagctggacagcggaagtccggctcagccagcccaaaccgctggcatggcagtattgctggggccggtggtcgttgccgattacctgcaacgcgaaaccctgcttcaacgtcagaacgacggcagcctgcaaggttccacagatggtcgttgggccggtagcctgtcgtcggatatcaaccagttgatgttgcgtcaggtcgccggccagctggacagccagcgtgtggtcctggcaccggggccctccgggttcaccccggatgtacaggtgttgctgaccattacgcggctggattccggcaagtcgcaaccggcgatcctggatgcgcagtggcgcctgatcgaccgtcgcgggcaggtgcgggacaaccgcattgtgcacctgcaggaagaacacgccggcaccaccgcgtcccaggtccaggcccagggtgtgctgttgcagcacctggcgcagcagttgtcggtggcactcaagccattggccaaccagccaccaattgccgaagtgcaaccgcgtaaacaggccccggcccaggccaagcctgcggccccggaaaaaccgaagatgccgatggccacgccgattcgtacggacttggaagtgttcaggttctgatctgaatcgcgcacaaacaaaaggcccgctgaataagcgggccttttgtttgggctgctctgtaggagcgagcttgctcgcgaaaagcgtcaacgataacgcgtgctttctgaataaacgcggcgtctgtgagtttttcgcgagcaagctcgctcctacaaaaggccttagcctcagggcttacgggtctcgtgcatccgcgccagttggcgctccagcatcgacggatacggctccatcaatcgctccacacagctggccccctcagggctggcaatcgggcggatacgcgcgcgttggcggatcagtgtgtcttcgctgatcttgcgctccaccaacagcaggttgcggctgtgctgggacagggccagggcatcctgggcgatttcagtgagcagcaggtcgatctggctcatgccaaacaggtcgtcacccacggttaggcccagctgcagttgcagggtaatgccgctgtcggccacttcgatctgcagggcgtggcccagggcgcgcaacagctcgccgcagcagatggcattggtcaggtagtcttcgccgctgtcttcgctgtggaacagcatcaacgtgctgccatcgttcagggtatgcagttcgctctggtagagcgaagcggcctggtcgaggcagtcgcggtagcgttcgagcagttcggtcaggcgggcacggggcaggcggcgcagttgctcctgggcacccagttgcacggcaagtacggcactgtgctgcggctcggcgttcttgaccacaaccggtttcggtgcggcaagcggtgctactgccgaggtgtcgcgcaggtcggcgaacgggtcttcgtcgtccagctcgtcttcctcggccttgatcacatggcgcggtgcaggcttgaggccggccaccggggcgctgtcatcgaagcctgggtcgcgcaggtcgcgcacttcaaactcaggctcgtcgttgtagtcctcggtgtcgtcgtactcaggctcgggctcgacttcaggcgctttcggctccggggcaaagctggcgtggagctggcgcgcgaggtcgccgatttcatcctggcgatcggtagccggggtgtgttcgtcgatatcccgcagccagatgcgcagttgcatcaacggcgtggaaatatgccgacccaggcgcaggctcaaggccagggccaaagccagcaggatcgcgctcaggatgcccatgctttgcaggctgatggtcatcggctgctggaactgttgcatatcaaggctgatacgcagttggccggccttcacgtcctggaacgtaatattgctctggtacaggccttcggcctcaccgagcaggccgtttttcgggcgctgcccggcctcggccatgatccggttgtccacgctatagatagcggcgtgggccaccagcgggttcttggtcaggttgttgagcaacacgttgaggctgaggatgtcgttggacaccagcaactcagtcgccgaagtggcggtctgggttgtcaggcttgcgcccagggcatcagcctgctcgtgcatggcctgcttgaactgcaaacccatcacgcaggcgtagatcaccagggccagagcgaccaggatcacgttatggctggcgatgcgcaatgcaatcggtacacggcgatggcgcagtgcccggaagatcagcaggaagaagttatcggtttttactggcgtgggccggttcacttgcgctcggctcttggtccgtgaagttgacgcgcagtatagcgacaggcccatggccggcaaagcgctggctgtgcccgatggtcactgaaagtgggtagaatgcggtttttttccagcctgggggtgcgctttgcgcgaaattgtcctgatcaacatcacgggtgaagaccgaccgggtctcaccgcagccattaccggcgtcctggcccagggtggtgtgaacattctcgacatcggccaggcggtgatccacgacaccttgtcgttcggcatcctggtggaaatccccagcaccgaacaggcctcctcggtactcaaggacatcctgtttacggcgtataagctcgatcaacaggtgcgtttcaccccggtgtccgaagccgattaccaacactgggtcgaaggccagggcaaaaagcgccatatcgtcaccctgttgacccgcaaggtaacggctgagcagctgcagcgcgtcagctccattaccgcgcagtacggattgaatatcgaccatatcgaccgtctgtcgggtcgcatgccattggacactccggccgacaaaggcaagggctgcatcgagttctccgtacgcggcgaaccggctgacgcgcaagcgctgcgcgccgacttcctgagcgtggcccaggagctgaatgtcgatatcgctttccaggaagactccctgttccgtcgcaaccgccgtctggcggtgttcgacatggactccaccttgatcgaagccgaagtcatcgacgagttggccaaagcggccggtgtgggcgagcaagtttctgagattactgagcgcgcgatggccggcgagctggatttccgtgccagcttcaaggagcgtctggcgctgctcaagggcctggacgtgggcgtgctggattcgatcggcgcgtcgctgcgcctgactgaaggcgcagaaaccctgttcgccgaactcaagcgcctgggctacaagaccgccatcctatccggcggcttcacttacttcgccaagcagttgcaggccaagctgggcattgactatgtattcgccaacgagctggaagtggtggatggcaaagtgactggcgtggcggtggagccgatcgtcgacgcgcaacgcaaggccgacctgctcaaggaattggcccacaaggaaggcttgcgtctggagcagaccatcgcggtcggcgacggcgccaatgacctaccgatgctggcgattgccgggttgggcgtggcgttccgtgccaagccgttggtcaagcaatcggccaagcaggcgatttcgaccttggggttggatggcgtgctgtacctgctgggcttgcgtgaccgcgacggtcagctataagccgatctcactgtcactgatcgttcccacgctccgcgtgggaacgcctccagtgacgctctgcgtcacgctttgggcgcagagcgcctcgggctgcattcccacgcggagcgtgggaacgatcaactgcaatatcaggctttcggcagtgcgataccctggcccatctgcaccggcgtacccgctgccagctcctcagcccacttcacctggtccggcccgaacagcacgatggcggtcgatcccagtttgaaacgacccagttccgcacctttttccagatgaatcggcgcgcgggcggcttcgtcgtagcgaaaggttttcagctcgcgcttgggcggcgtcaccaagcctgcccacacggtttcaatcgaagcaacgatcatcgcacccaccaacaccacggccatcgggccgcgttcggtgtcgaacaagcagacagcacgctcgttacgggcgaacaactccggcacgttttcggcggtggtctggttgaccgagaaaatccgacccggcacatacaccatctcgcgcagggtaccggccaatggcatgtgcacccggtggtagtccttgggcgacaggtaaatagtcgcgaactcgccgcccatgaacggcgcagccattgccgcatcgccaccgagcagttccagcacgctgaagctgtggcccttggcctggaagatacggccatgttcgatcgggcctagctggctgaccgcgccgtcggcagggctcaggactgcgcctggggttggatccaacgggcgggcgccgtctttcagcgcgcgggtgaagaaggcgttgaagtgctcgtaggcgctcaggtcttccaccagggcctgggacatgtccacctggtagcgcttggcgaaccaggcagtgaaggcgttcttgaaccagcgcacgcggcactcggcgatacagccggccaggcgcgacagcaagtggtgcggcagcaagtactggctgaggataaacaactgctttttcataactgtccttaaaccttaaatctcaacgggggtgtcggggtggttgccccattcgccccaggaaccggcataacctttgactcgcggataaccgagcgccttggccaccaggtaggtgaagccagagcggtggtgagtctggcagtgggtgatgatttctttgtctttggtcagcccgaggtcttcgaggatctgcggcatgtcacggcgaatacgcaggttgcgcgccttgtccatgccggcggtccattcgaagttcaccgcaccgggaatgtggccgcccttggctgcgagcactttctcgccggaatactccagcgggccacgagcgtcccagatccccaggtcggccgcaccgagacggctttgcaggtactcacgggtggcggtagggccgtcgtgcagcgtgaggctgaccgggccgccggctgccgggggcacatcggtggaaagcgggtgcccttcctccagccatgccagcaggccgccgtcgaggtagtgatatttctggtggccgatcacgtcgagcatccagataaagcgcccggcccaaccgccgccttcgtcgtcatagaccacataggtggcgtccggggtgtggcccagttcgccgaacagtttttccaggtcggccttgctcggcagcagcccgggtgcgggtggctggcccagttgggtgcgcttggggtcaacgaaatgcgcgccggggatatgcccttcggcgtagcgggcggcactggtgaggtccaccaatatcaagtgcttggaatcgaggcgactcaacaggtcggcggattcgatcaccagcggcaagccagagaagtcaggcatgtgaggtctcctgggcacaaatgttggcgataaaggccggtgattgtagcgcaagcatcagccgctgcggttggtaaagctgtgcagggctttctcgatgcattgggcggttttgccgaacgcctgcacggtggtttccgagaacggcccgccgccttggtccgccacgatcagcatgaccacgcggccgttgcagctcagtgagcgcaacagcaggtgctcgccgataaacaagcgacgcaggatcggtggcagcaaggcggaaaactgcgcatggttgtcggggttcaggcgtacctgggcggacttttccagcaggcgttgcagcaacgtgctgttgaccacatccaggctcaggtgagctgcgtccttgggcaggccgtcggcctggtgcacgcgcaaggtgctcaaggcgcgatcggccatgaatatcagtacccgctgcatgccactggcaaccagagcttccttggcgcaagtggtcaagtgcatagcgttggcaaagcggctcggctccaccagcaactcggtgcatcgcgtgcgccacacggccaaggcttcggcagtcggaggcggtgcaggcaacaagccgcgatggaccttctgcacatgccacggccagatcagcgacagcgccgggtgccagaggtcgggcatcaaggtggtacgagcgctggtcaccgcttgctggtgggcttgctgttgcacatcgctcaatggcgcttgcaggtacagcgccgtcaggtattgccagcgctcggtatgcgggcaggtccaggactcctgggccgacatcgccaggccattggccagcaacacggtgttggccggctggttcagccagcgtcgtaggttgggctcggcatcgagcaattgctggtggcgcagggcatcgtcttggcgggcaatgtgcagcgccttgaccagcaggcgttgctcggccaacagcaacttgtagccctgtgaaacccagatcggcaggtgccaggcttcggtcaagcccaggcacaggtcaagcaaacgcacgccgaacagctgttgctcgacctgacgcgccgattggcctttatggatcacccgcaactcccactcctccagaagcttggggtaggcgacggccatcggccacagtggcgacaaaaacagcaggctgccccagtggatgtcctgccacaaccgcgccaggcgactgccgaacaaaccgttggcttgctgggatgcgtgctggctgatcagcagcagttgacgcaaggccacggggatttcccgggcgggtaccgaaggcaggcgcgccagcagctcctcggcacgtttgaggccaagacggttaagcgcgacttcaaggttttccgcaggttcggccaggctaccatgggcttggctgttggcttcgcgcatcacgctcagcacgagggccgggctgtcttgcatcagctccgcaatatctcgcaatgaactgcggctatcgcgaatagctttgcacacgcgctcatgactggcctggggcacgggcagcagcacgtcgtccaggcacttgatccaagcggcgagggtagtggggcggttcgttgggactgtcgtttcaattgccatgattggggcgcgatcatcacttgcgttcaacacgcccggaacgggccgaattggcttttcgccttaacgggctatagtctggcgcagttttgccgataagtagaacaagagttttctgctgcacccaatatgtccatgaacccgacggcgcaagtacccctctcctatggctaaaattatcggcatcattgtcgtcatcgcaagtgtgctcggagggtacgtcctctcccacggtaaaatcgccgcactgatccagccttttgaggtgctgattatcggcggtgccgcgttcggcgcatttttgcaggccaacccaggctatatgaccatgcacgtggtcaagaagtccctgggcatgttcagctcgcgcttctcccacacgttttatctggaagtgctggggctgatctacgagatcctcaacaagagccgccgcgaaggcatgatggcgatcgaaggcgatatcgaagacgccgcggccagcccgatttttgccaagtacccggccgtgctcaaagacgagcgcatgaccgcgtatatctgtgattacctgcgcatcatgtcctccggcaacatggcgccccacgagctggaaggcctgttcgacatggagctgttcagcctcaaggaagagctggagcatccgtcccacgccgtgaccggcatcgccgacggcatgcccggtttcggtattgtcgcggcggtactgggtatcgtggtgaccatggcgtccctgggcgagggcgatcaggcggccatcggcatgcacgtaggtgcggcgctggtggggaccttcttcggtattcttgccgcctacggtttcttcggcccgctcgccacttccctggcccacgatgccaaggaagagatcaacctctacgaagcgatcaaggcgtgcctggtggcatcggcgtcgggcatgccgccgtcgctggccgtggagtttgggcgcaaggtgctgtacccgaaacatcgcccgagtttctccgagctggaacaagcggttcgcggtcgctaagccatggaaaacaaccagccgatcatcatcaagcgcgtcaagcgcttcgctgcggggcaccatggcggtgcctggaaaatcgccttcgccgactttgccacggcgatgatggcgttcttcctggtgctgtggctgatgtccaccgctacgccagaacagaagatcgccatcgccggctacttcaaagacccgattggcttttcggaaagcggcactccgtttgtcattgacctgggcggctcgccggaactggcgcccgagcgcaccatcaacccggaagtgcaaacggagtcgccccaggaaaaaattccgattgagcgcgacactgtcgagtccatggccgaacaggtcgaacaggagcgtctggaactgttgctgcaggaattgcagaacaaggttgaagaaaacccacagttgctgaagttcaaggaccagatttctttcgagatcacccccgaggggctgcgcatccagattaccgatgcggccaaccggccgatgttcgactctggcagtgcgcgcttgaagccgtactttgaagacatcctgctggccatggctgacaccatcaaggcggtgccgaacaagatcagcatcagcgggcataccgacgccaagccctacgcgggccagggcgatttcggcaactgggaactctcggccaaccgcgccaatgccgcccggcgtgcgctggtagccggcagctacccggacccgcaagtggcgcgcgtggtgggctttgcctcctcgcagctgtttgatcccaaagacccgttcaacccggtcaaccgccgcattgatatcgtggtgctgaccaaaaaagcccagcgtgcgattgaaggcgatcaaccaccgccaccggcaccgacccagggcgacggtgcgccaggcgaagtgccggccgaccccaacgccctgccgccggagcaggagccgctgccggctcatgagctgcgccagaagctgaacctgtttgatgctgggggtatcaaggaccctacggcgcctgccccggggtcataattgatctatgcgctggtaacgaaaacgccccgatcattcggggcgttttcgtgtgtgttcaaagtgggaggtacgctttgacaccactgactacgcctcgcatgtcgtcggcgcacaggcgcgggacgaagtactcccgacctttggtgcgagtctttctatgcaacttgtcgaggcgctcaaagctgacggtataaatcatgtcgcacttcacccatagctctttataaccatcggactgaagtggattggtgcgtagcaaatggtgccagtcgtattgggtcgctggtgcagtagaggagattggcaccacggtgcagagcttgcgattgtgggtcgcggtaggcgatatcacgacaaccttgcggatcttcagcatttccggtgcaacaaaacctcgggtgaagtcacacagcaaaacgtcgccttgtttggggtgatagtagagagccaaatgttaattccccacaaaaagcaaagccgcccgaaggcggcttcattcgacacgcagcggagcttgcttcgccccttctgcgccgctggatcaaccccgaaaaggatccagactcctgccagctttcgctggtgacggagcaattatgagcatcaggaaatccgaatacaagctggcttgtgcgtatcagccacccagttgatccggattcttgatgcccgctcctgttaaatcaatgggctagggcgttcagcaccctggtttatgtgtatcaagaaattgaccgtcaataactgctctcgggcaagctcgcaataatcgaccgatagctgttcatccgctgctgctgcacgcgcccatcttccagtgccttgagcaacgcacaacccggctcgcgatcgtgtttgcagtcgcggaagcggcaggtgccgatcaggtcgttgaattcgatgaagccggcctccacatcgccgcggctgacgtggcccaggccgaactcacgaatacccggcgagtcgatcaactcgccgccgcccgggaagtggaacaaccgcgcggtggtggtggtgtgggtgccctggccggacagttcagacagcgggcccacgcgggtttcgacttccggcaacaggctgttgaccagcgacgacttgcccacgcctgactggccgacgaacacgctgatccgcccgtccaactgctgttgcagctgttccatgccgttgccgtggtgagccgacacttccagcaccgggtagcccagggtgcggtagaccgccagcaacgcattgagcgccggggcgttctgctcgtcgatcaggtcgaatttgttcagcagcagcaacggacggataccagcatgctcagccgcgaccaggtagcggtcgatcaggttggcatggggctcgggcagcggcgcgaacacgatcacgatcatgtcgacgttggccgccaccggcttgagctgcccacggctgtcggggcgacgcagttcggtgctgcgcggcaactgggcgacgatgacgccgatgccctggttgccggcacgccacaccaccttgtcgccggtgaccagcgcaggcaggttggcgcgcaagtggcaacggaacacctggcctgcgagttcgccttcgagcgcctcgacttcgacctgcacaccaaagtgcgcgatcaccaggcccgtttgttcggggcccaggtcgccgccctcgagcgcttccacggcggaggattcacgtttggcggcgcgggcggcgcgttcaccttgaatcttttcgatgcgccagttttggcgacggttgagctggcgtttggccattggtgttccgtgtcgataatgcaaaagttgggtaaaacggtcgcgagtctagcacgcccccgcctgctaaactgcccggctacgccaaggtgccaagagaatcaagccatgcaaaacccacagaacctgatttggatcgatctggaaatgaccggtctgaaccccgacaccgacgtcatcatcgagatggcgaccattgtcaccgacagcaacctcaacaccttggccgaaggtccggtgatcgccatccaccacagcgacgctgtgctcgccaccatggacgagtggaacacccgcacccacggtaactccgggctgacccagcgcgtgcgcgacagccgcatcagcatggccgaagccgaagcccaaaccatcgccttcctggaaaagtgggtgcccaaaggcaaatcgccgatctgcggcaacagcatctgccaggaccgtcgcttcctttatacacacatgaaggggctggaaagttacttccactaccgcaacctcgacgtgtcgaccttgaaagaactggctgcgcgctgggcgccggaagtcaaagacagcttccataaaggcagcacgcacttggcgctggatgatattcgcgagtcgattgccgagttgcagcattaccgcaagcatttcatcaaggcttgattctgcggcgcctgtggaggcgccatcgcaggcaagccagctcccacatttgatggtattcgcaaatcaaattgtgggagctggcttgcctgcgatgcaggcgacgcggtctttagccaaacgcccccttttggtgccctcggcaaatgattagactgccggcctctctgtcaggatcgccatcatgttgctgatgctctacctcgtcgccatcaccgccgaagccatgactggcgccctgtccgcggggcggcgtggcatggactggtttggcgtggtgctgatcgcttgcgtgacggccctgggcggcggttcggtgcgtgatgtgttgctcggccactacccgctgacctgggtcaaacacccggaatacctggtgctgacctccgttgccgcgttggtgacgatctttatcgcgcccttgatgcgccgcctgcgctcgctgtttttggcgctggacgccttggggttagtggcgtttaccctgattggctgcatgaccgccctggaaatgggccacggcatgttggtggcgtccgtcagcggggtcatcaccggcgtattcggcggcattctgcgggacatcttctgtaacgacattccgctgatcttccgccgcgagctgtatgccagcgtgtctttcctggcagcgtggttctacttgttgtgcctatacctggagctgcccagcgagcaagcgattctgctgacgttgttcagtggcttcctgctgcgcctgctggcgatccgttttcactgggaaatgcccaagttcgtctacaacgacgacgtccactagcgcgcagcgtgttgctccagcgcccactccacgtgttcgcgcaccaactccgaggggtagtcccgtcgcgccttcaaggcttccagcactggaatgctggagggcgcattgcccaggcccaccgccagattgcgtaaccagcgctcataaccggcacggcgcaggggcgagccctcggtgctgctgaggaatttatcctcgtcccacataaacaattcggccagttcagcgttatccagattgtgccgtggcttgaaatcgctttcggcggtgggtcgggcgaaacgattccacgggcaaacgatctgacagtcatcgcagccaaacacccggttgccgatcagtgggcgcaagtcctcggggatggcgcttttgagttcgatggtcagataggaaatgcagcggcgcgcgtccagcacgtaagggccgacgaaggcgttggtcgggcagatgtccaggcacgctgtacaacggccacagtgttcggtggcgtggggtgggtccaccggcaggggcaaatcgacaaacagttcgctcaagaagaagtaactgccggccttgcggttgagaaccagggtgtttttaccgatccagcccaggcccgcttgttcagcgatggctttttccaggacgggcgcgctgtcgacgaaagcgcgaaagccaaacggcccgatctgcgcctggatacggtcggccagttgctgcacgcgcttgcggatcagcttgtggtaatcgcggcccagggcgtagcgcgagatgtaggctttttctggttgggccagcaattgcgccatgtgggtatcgccgggcaggtagtccatgcgcagtgacaccacgcgcaaggtaccgggcaccagctcgtcggggtgggagcgtttgctgccgtgggcgcccatgtattccatctcgccgtggtaacccgcgtcgagccagcgttgcaggtgctgttcatgctcagccaggtcgaggccgctgatgcccacttgttgaaagcccagctcgcgaccccagtctttgatcgattgggcgagggcgggcagatcggaggtaatagcaggcatgagacacgggaaaccacaggttagatgcgtataattctgccagacatcggagcttgaagacgcatgcctcagacaaaacacccaattactgacgttcagctgttgttgcccggccatttgccgcaactggccgcgcgttccccggacgcccataagggccagttcggccacctgctggtcatcggtggtgactgtggctttggcggcgcggcgctgctgagcagcgaaagtgccctgcgcagcggcgccggcatggtctcgctggcgacgcggccggaacatgtgccggccgctctggctcggctgccggaggtcatggccgtcggcgtgagctcggccaaccagttgatgggcctgctggaaaaaatctcggtgatcgtcattggcccaggcctgggcgatgccgcctggggcaaaagcctcttgtcggtcgcggccaatgccaacctgccgcaggtatgggatgccgatgcgctcaatcagctggccactggcagcgtggagctgccggcccactgtgtgattacccctcatccgggcgaagctgcgcgtttgttggggctatcgacagccgaggttcaggcagatcgccttaaggtggcgcgcgcgttgagccagaaattcaatgctgtggctatcctcaagggtgctggcagtttgattgccagcccggatgggcgcgtgtcgcggtgtgatcaaggccatccggcgatggcaacagcggggctcggcgatgtgctggccggcctggtcggcgcactattggctcagggtatgcccgcgtacgaagcgagctgcctggccgtgtggttgcacgcgaccgccggagaccgccagggcagttttggtcgcggcttggctgccagcgacctgatccccgccattcgtcaattgctggaggagcagtcgccgtgcctgaagtaattcttttcctggcaaatgaagaggccatggtcgtgttgggtcagcgtatttcgcaggtcacgcaaggggccgggttgatctttctcgagggcgacctgggcgcaggtaaaaccacactgtcccgtgggattattcgtggccttggccataccggcgcggtaaaaagcccgaccttcacgttggtcgagccctacgagatcggcgacgtgcgagccttccacttcgacctctatcgcctggtcgatccggaagagctggagttcatgggcatccgtgattacttcgacgatgatgcgctgtgcctgatcgagtggccaaataaaggcacaggctttttgccaaagccggacctgaccattaccattacgccgcatgagcacggacgtcagctgaagttgttgccccagagcccacgcgctgagtcgtggtgtgctgctctggcattggaattcaaataattggtggggttaggtatgcgctttcgcgcgttggttgctgtcgtgggggtgttgcttgcggcaatgactgtcaatgctctggctgcttcacaggtgaaaagtgttcgcctgtggcgagcgccggataatacgcgactggtgttcgacctgtctggcccggtccagcacagcgtctttaccttgacggcgcctgatcgcctggtgatcgacatcaacggtgccagcctggccgcgccgctgaaagtctccaccgccaacacgcccattaccgccatgcgctcggcccagcgtacgccgaccgacctgcgtgtggtcatcgacctgaaaaaggccgtgacccccaaaagcttctccctggcccccaacgcccaatatggcaaccgcctggtggtcgacctgttcgacaaccccgccgacgccgcaccgccgcctgcgccaacgccgagcgtggcgacggtgcctgcggtgccagtcaacccttcgcaaccccaggtcaagctgccaccgccgccgcccgccccggcgggcaagcgcgacatcatcgtggtgatcgacgccggccacggtggcgaagacccgggggcttccggctcacgcggccagcacgagaaagacgtggtgctcgccatcgcccgtgagctgcagcgccaggtcaacggtatgaaaggctaccgcgccgaactgacccgcactggtgactacttcattccgttgcgtggccgtaccgaaattgcccgtaagaagggcgcggacctgttcgtgtccattcatgccgacgccgcgccttcaaccgctgcctttggcgcctcggtatttgccctgtcggatcgcggcgctacctccgagaccgcacgctggctggccgacagtgaaaaccgctccgacttgatcggcggggccggcaacgtgtcccttgatgacaaggacaagatgctcgcaggcgtactgctcgacctgtcgatgaccgcctcgttgacctccagcctcaacgtgggccagaaagtcctgagcaatatcggccgtgtgacctcgctgcacaaacagcgcgtggaacaagccgggttcatggtgttgaaatcgccggatatcccgtcgatcctggtggaaaccgggtttatctccaacgccaacgaagcgtcgaaactggccagcgccagccaccagcaagcgttggcgcgctcgatcagcgccggtgtgcgccagttcttccagcagaacccgccgccgggcacttatatcgcctggctgcgcgactccggcaaaatcgcccagggcccgcgtgaccatcgtgtgcagcccggtgataccgttgccatgctggcggtacgtttccaggtcacgcctgcagccttgcgcagcgccaataacctgaaaaccgatgagttgaagatcggccaggtgttgaccattcccggcactgaattggcggcacagtaatgagcgaatccaccttgaacagcggctcgcgcattgaattgctcagcccgcgccttgccaaccagatcgccgcgggtgaggtggttgagcgcccggcgtcggtgatcaaggagttgctggaaaacagcatcgactccggtgccaaacgcatcgatgtcgatgtggagcagggcggcgtcaagctgctgcgggtacgtgacgatggcagcggtatctcttcggatgacctgcccctggccctggctcgtcacgccaccagcaagatccgcgacctggaagacctggagcgggtcatgagcctgggctttcgtggtgaggccctggcctccatcagctccgtggcccgcctgaccctgacctcccgcacccgcagcgccgagcaagcctggcaagtggaaaccgaaggccgcgacatggcgcctcgggtccagccggcggcccatccggtgggcacctcggtggaagtgcgcgacctgttcttcaataccccggcgcggcgcaagttcctcaaggccgagaaaaccgaattcgatcacctgcaagaagtcatcaaacgcctggcgttggcgcgtttcgatgtggcctttcacctgcgccacaatggcaagaccatccttagcctgcacgaagccaacgacgacgccgcccgtgctcggcgggtggcggcggtgtgtggcagcggcttcctggagcaggcgctgccgattgagatcgagcgcaatggcctgaggctgtggggctgggtcgggttgccgacgttctcccgcagccaggccgacttgcagtatttctttgtgaacggccgggcagtacgcgacaaactggtggcccacgcggtgcgccaggcttatcgcgatgtgctgttcaacgggcgccaccccacctttgtgctgttctttgaggttgacccttcggtggtcgacgtcaacgtgcacccgaccaaacacgaggtgcgcttccgtgacgggcgcatggtgcatgacttcctctatggcacgctgcaccgcgccctgggcgacgtgcgtccggatgatcagttgtccgcgccgattgtcacagcggtggtacggccaagcggtccggaagccggcgagttcggcccccagggtgagatgagcctggcggccaacctgctgcaatcgccacaggcgcagccagcctacacggcgccaaattcgggtgccggtgcgggttatcagtatcagtacacgccgcgcccgcaatcgacggtgccggtggccgaagcccaggcggcgtaccgtgagttttttgcgccgctgccgggtgccgagccgggtgctgctgtggcgttgcccgaaggcggtggtgatattccgccgctgggctatgcgctggcgcagctcaaaggcatttatatccttgccgaaaacgcccatggcctggtgctggtggacatgcacgccgcccatgagcggatcatgtacgagcgcctgaagatcgccatggccagcgaaggcctcagcggccagccgctgctggtgcctgaatccctggcggtgagccagcgtgaagccgactgcgcagaagaacatcacagcgtgttccagaaactgggcttcgagctgcaacgcctgggcccggaaaccctggcgatccgccagattcccgcgctgctcaagcaggccgaggccaaccgcctggtggccgacgtgctggcagacctgatggaatacggcaccagcgaccgtatccaggcgcatatcaacgaattgcttggcaccatggcctgccacggcgccattcgcgccaatcgccgcctggcactgccggaaatgaacggcctgctgcgcgacatggaaaacaccgagcgcagtggccaatgcaaccatggccgaccgacctggacccagatgggcctggacgatctggacaaactgttcttgcgcggccgttgatgagcgccttgccccccgccatcttcctgatgggccccacggccgccggcaagaccgacctggccatcgagctgaccaaggtgctgccttgcgagctgatcagtgtcgactctgccctggtttaccgggacatggatatcggcaccgccaagccgtcgaaagcgctattggcccaatatccgcaccagttgatcgacatcatcgacccggcgcagagctattcggcggcggattttcgcaccgacgccctggcagccatggccgagatcaccgcgcgcggcaatatcccgctgctggtggggggcaccatgctctattacaaggcgttgcaggaaggcctggccgatatgccgcctgccgatgcccaggtgcgcgccgaactggaagaagaggctgcgcgccttggctggcaagccctgcacgaccagttggcggcggtagacccggtgtctgcggcacgtattcaccccaatgacccccagcggctcacccgcgcgctggaagtctggcgtgtcagtggccagaccatgactgaacatcggctgaaacaaagtgcgcaaagtgctgacgcaggcgcatctggacagtcacaattgccctatactgtggcgaatctggccattgctccggcaaaccgccaggtgttgcatgaacgaattgcacaaagattcacattaatgttggaacaggggtttgtggacgaggtcgtagcattgcgttcaagaggtgacctgcatgcagggctgccttcgatacgtgctgtaggctaccgccaagtctgggatcatctggatggcaagctgacgtcagccgaaatgcaggagcgcggcattattgccacgcgccaattggcgaagcgccagttcacctggctgcgcagctggagcgatttgcactggttggatagcctggacagcgacaatctgtcacgcgccttgaaatacttgggaacggtctccatattgagctgagtccttgcaattgccgtctatccttgggggtgtgacggccataagctatctattttccgattttttattattgatccttaaaggagtgcggcacatgtcaaaagggcattcgctacaagacccttacttgaatactttacgtaaagagaaagttggggtttccatctatctggtcaacggcatcaaactgcaaggtacgatcgagtcgttcgaccaattcgttatcctgctgaaaaacaccgtcagccagatggtttacaagcacgctatctcgacagtcgttccagttcgtccaatccgtctgcctagcgcagcaggtgatgaacagggtgacgctgagccaggtaacgcctgataggagtctcctttgttctttgagcgccacggtggtggtgagcgagtaatcctcgttcacttggatggacaggaccctgaggcgcgcgaagatccgcaggagtttcaggagttggcaaattcggccggcgccgagaccgttgcgttttttaacgtaccgcgtcatcggccaaccgccaaatacctgattggcagcggcaaggtcgaggaactgcgcgacctggttcatgccgaagaagccgatctggtgatcttcaatcacaccctcacgcccagtcaggaacgtaacctcgaacgtgttttcgagtgtcgcgtgatcgaccgtaccggcctgattctcgatattttcgcccagcgcgcccgcacccatgaaggcaagctccaggttgaactggcccagcttgaccacatgagcacgcgcctggttcgcggctggactcaccttgagcgtcagggtggcggtatcggcatgcgtggcccgggtgaaacccagttggaaaccgaccggcgtctgctgcgggttcgcctgcgccagatcaagggccgcctggaaaaagtacgcagccagcgtgaacagtcgcgacgtggccgctcccgtgcggatatccctacggtgtcgttggtgggctacaccaacgccggcaaatccacgctgttcaataacgtgactaaatcggacgtgtacgcggcagaccaactgttcgccaccctcgacccaaccctgcggcgtctggacatcgacgacctggggccgattgtgctggccgataccgtgggtttcattcgtcacctgccccacaagctggtggaggcatttcggtctacgctcgaagagtcgagcaattccgacctgctcttgcacgtgatcgatgcggccgaaccggatcgcatgttgcagattgaacaggtgatggtggtactgggcgagattggtgcccaggacttgccgatcctcgaggtctataacaaactcgatttgcttgaaggcgttgagccacagatccagcgcgacgagaatggcaagccccagcgggtctggctgtcggcgcgagatggcagcggtctggagctgttggaacaagccattgccgaattgctcggcagcgatttgttcgtcggcaccttgcgcttgccgcagcgttttgctcgactgcgtgcacagtttttcgagctgggcgcggtacagaaagaagagcacgacgaagaaggtgtcagcttgctggctgttcgattgccacgctcggaactcaatcggctggtcagtcgagagggtgttgtaccggcagagttcatcgaacaacacactttgcaataaaagcctgagaaagcggttgtgccgcagtagcaggcattctgtagcattggtcggcgcgccgtgggtgcgtctttgctttatcagatggagagcgctatggcttggaatgagccgggtggcaactcgaataatcaggatccttggggtggtaagcgccgcaataatggcgaccgcaaggggccaccggatctcgacgaggccttccgaaagctgcaggaaagcctgaatgggttgttcggtggtgggaaaaaacgtggtggtgacgacggcggtcgcacaagcaagggcggtggctatggcctgctgggcctgggtcttgtcgtgctggcggccgtatggctctacagcgccgtgtacgtggtagacgagcaggagcaagccgtggtgctgcgcttcggcaagtactacgagactgtcggcccgggcctgaatatctatttcccgccgatcgacaagaagtacatggagaacgtgacgcgtgagcgtgcgtacaccaagcagggccagatgctgaccgaagacgagaacatcgtcgaagtgccgctgaccgtgcagtacaagatcagcaacctgcaagacttcgtgctgaacgttgatcagccggaaatcagcctgcaacacgcaaccgaaagtgccctgcgccacgtggtgggctccaccgccatggaccaggtgctcaccgaaggtcgtgagttgatggccagtgaaatcaaggagcgtctgcaacgcttcctcgacacttaccgtaccggtatcaccgttacccaggtgaacgtacaaagcgcagcggcaccgcgtgaagtgcaggaagcctttgacgacgtgatccgtgcccgtgaagacgagcagcgttcgcgcaaccaggctgaaacctatgccaacggcgttgtgccggaagcccgtggtcaggcccagcgcatccttgaagatgccaacggttaccgtgacgaagtggtttcccgcgccaagggtgaggcagatcgtttcaccaagctggtcgccgagtaccgcaaggcacctgaagtgacccgcgagcgtctgtacctggacaccatgcaggaagtcttcagcaacaccagcaaggttctcgtgaccggcagcaaaggtgggcagaacaacctgctgtacctgccgctggacaagatgatcgaaggtggtcgtagcggcgccagtgcaccgtccaccggttcgaatgccgctgccaacgaagcgagcgcccgtgcggccgctgacttgctgcaacagcaaacacgtaccagggagagccgttgatgagcaataaatcgctgaccgccctgattgtgggcgtcgtcgtggtcatcgctgcctggaactgcttctacatcgtcgctcagaccgagcgtgcggtgctgctgcaattcggtcgcgtggtccaggcggatgtccagccgggcctgcatgtgaaagtcccctacgtcaaccaggtgcgcaagttcgacgcccgcctgatgaccctggatgcaccgacacagcgcttcctgaccctggaaaagaaagccgtgatggttgacgcctacgccaagtggcgcgtcaaggatgccgagcgcttctacactgcgacttccggcctcaagcagattgccgacgagcgtttgtcccgtcgtctggaatcgggcctgcgtgaccagtttggtaagcgcaccctgcacgaggtggtatccggtgaacgtgatgcgctgatggcggatatcactcgctcgctgaacaccatggcggaaaaagagctgggtattgaagtggtcgacgttcgcgtcaaggccattgacctgcccaaggaagtgaaccgcagcgtgttcgagcgtatgagcaccgagcgtgagcgtgaagcgcgtgagcaccgcgccaagggtaacgagttggctgaaggtatccgtgccgatgccgaccgtcagcgtcgtgtactgctggcagaagcctaccgcgagtctgaagaggcgcgtggtgatggcgatgctcaagccgcggcgatctacgccaaggcctacggccaggaccaggagttctacgcgttctaccgtagcctgcgcgcctaccgtgaaagcttcgcgaacaaaaccgacgtactggtgctggacccaagcagcgacttcttccgctacctggaaaagtccaagtaaccagcccgtgattctgtaaggcgcactccgtcgggcggctaaaatgcctggcggggtgatcctttcagaaaacgggtgtatgatgcggcagccgggaaattcccggcttttttgcgtctgcatgtttgattcggcaggcgtgacaggtttttcgaggaaagtgcccgacgaggccgtttgcaggccgttcgtcacgtcgctcttgcgcgtggtttatgcaagagccgggtattttctgcttcactcaaggctcggccgagggctggccgcccggatcaaaggggaatggcgtaatggcaacggtagaccgctggctgctgccagatggcatcgaagaagtactgccaccagaagctgcgcgcattgaagtagcgcgtcgtcaggtgttggatctgttccagagctggggttacgagtttgtcgtgactccccatatcgagtacctggaatccctgctgactggcgcgggccaggacctggatctgcgcaccttcaaggtcatcgacccgcaatcgggccggcaaatggggttccgtgccgacatcacgccgcaagtggcgcgcatcgatgcgcacaccctgcgtcgcgaaggcccgagccgcctgtgctacgccggcagcgtactgcatgcccagccacgtgcgttgtcgtcttcccgtagcccgatccagttgggcgccgagttgtacggtgacgccagcccgagcagcgatgttgaagtgatcagcctgatgctggccatgctgcaactggcggatgtgccggatgtgcacatggacctgggccacgtcggtatctaccgtggcctggcgcgcgccgccgggttgtccggtgaagtggagcaacagttgttcgatgccctgcagcgcaaggcgatcgatgaagtgatcgccctcaccgagggtgtgcctgctgagctggctggtatgctgcgcgcgctcgtagacctgtgcggcggccgtgaagtgctggtggctgcgcgtgagcgactggccaatgcgccggcgccggtattggcggcgctggatgatgtgctggcgattgccgagcgcttgtcggcacggttcccggagctgccgctgtattttgatctgggtgaattgcgcggctatcactaccacaccggtgtggtgttcgcggtgttcgttccgggtgttggccaggccatcgcccaaggtggtcgctatgacgatatcggcgccgacttcggtcgtgcgcgtccggccactggtttttccaccgatttgaaaaccctggtgaccctggggcgtgctgaggtcgagctgccgtctggtggcatctggatgcccgacagtacggacgcagcgctctggcagcaggtttgccagttacgccgtgagggtcagcgtgtagtccaggccttgcctgggcagccattggccgccgcccgtgaagcggactgcgaccggcaattgattcagcagaacgggctttggcaagtatcgccactggcttcttgagttttcctgccggccatcgccggcaccaagtttgcgcgaatgaggacaagtgttatgggtaagaatgtcgtagtcctgggcacccaatggggtgatgagggcaaaggcaagatcgttgatctgctgaccgaacatgctgccgccgtagtgcgctaccaaggtggccacaatgctggccacaccctggtcatcgatggcgaaaaaaccgtcttgcacctgatcccgtcgggtgtcctgcgcgaaggcgtgcagtgcctgatcggcaatggcgtggtggtcgcacctgacgccctgctgcgcgagatcaccaagctggaagagaaaggcgtaccggtgcgcgagcgcctgcgtatcagcccgtcctgcccgctgatcctgtccttccacgttgcgctggaccaggcccgtgaaaaggcgcgtggcgagctgaagatcggcaccaccggtcgcggcatcggcccggcctacgaagacaaggtcgcacgtcgtggcctgcgtgtgggcgacctgctcaacatgccgcgctttgaagacaaactgcgtgaactggtggattaccacaacttcatgctggtgggttactacaaagagccggccatcgagtttgaaaagaccctggccgagtgcaaggaatacgctgagctgctcaagccgctgatgctcgacgtgacggccgagctgcacgacctgcgtcgcgctggcaaggacatcatgttcgaaggtgcccagggttcgttgctggacatcgaccacggtacctacccgtacgtgaccagctccaacaccaccgctggcggcgttgcgaccggttctggcgttggcccgatgttcctggattacatcctgggcatcaccaaggcctacaccactcgcgtaggttcgggcccgttcccgactgagctgttcgacgacgtcggtgcgcacctggccaagcaaggtcacgaattcggcgccaccactggccgtgctcgtcgttgcggctggttcgatgccgttatcctgcgtcgcgctatcgatgtgaacagcatctcgggcatctgcctgaccaagctggacgtactcgacggcctggaaaccatcaacatctgcaccggctacaaagatgctgaaggtaacgacgttgctccgaccgacgctgacagctacgtgggcctgcagcctgtgtacgaagaagtgccgggctggactgaatcgaccgtgggcgccaagaccctggaagagctgccagccaacgctcgtgcttacatcaagcgcgtcgaagcgctgattggcgcaccgatcgacattatttcgacgggcccggaccgcaacgagaccatcgttctgcgtcacccgttcgcgtaataagctgttgatgtaacaggcaaagggctccttagggagccctttgtcgtttctgcctggcaagcggcacgacccttgctgtgtttccctctttcgaggtgctatcaaattagtggcacccgtggtggagggatttccagtgtctgccgttctctcgttgttacaaagccgtctattgcggccggtgttcgttacccttggtatcgctcttttggtgcaagtgctggtggccgtcgcgctgacgcggagcacggtgacggcgctggaagccgatttgggcaatcgcctgggcattgatagccagaagttgtctggcgaactggcccaggccggtaaggaagttacgtccagcctggacagcctgtccgccagcacgcgccagcgcctgacagccgggctttccacgcgcttgcaggaagagcaaaagcaattgcgtgcgacgttggaaaaagacctgcaggactctgccaatgacatggcgcaactgctggcctcggtcgcgccccgcgccatgtgggacagcgatgtacctacgctgtcggagttcgcgcgccgggcccagcgcaaccccaatgtgctgttcgtggtgtatgacgacgccgcaggcgagcacctgacccgatacctgaaccgcgaaaacccgatcaaccaggccctgctggcaaagggcgcaggggagcgtgccctggataaggtgctggacgcggccaagacagacccgtccgtgtattacgtcgaagcctctatcagccccaacggtgtggagatcggcaaggtgcgcatgggcgtgtcgaccgcgacggttgaagccgatctgcaagccttggataagcgctttgccgcgttgatcgccagcggtgaccaactggtgggcgatagcctcaagggcgccgcagctgacagtgccagcgccatgggcgcccggctgcaatcggcgcaagccactgccacgcaaatgacggcgaacaccgcggccgccgtgcaagaagcggcgggcaccctgcgctggcgcatcggcatgggcctggcactggtggggcttggcgtattgctgctgatcgctatcgtgctgggccggcgcgtggtcaatcgcctgaagctgctgattgccgcgatggatgaccttgcggcaggtgagggtgacctcaccaagcgcgtgcagatcaacagcaaggacgaaatcggcgatatggcctcggcggtcaatcgctttgtgaataagttgcagcccatcgtgcgggaggcgggcgacgtggcccagcgtaccggcgtggaaatcggcgccatgacgctgcgcaatgccggcgccgatgcggcggcgggtttgcagcgtgatgaagtggccgagagtttgcgcgccttgtcgcaaatggccgacgaggcccaggccgagagtcacgccatgcaggcggccttgcagcaagtggtggatattcgccaggccacggatgaaaactcacggacttcagccgaagtcggcagcttgatcgaggcgttggcagggcaggtgcaggccggctcccaggtgatcgaacggctggcgcagcaaagcgaacagatcgaagtggtgttgaccgtgatccacggcatcgccgagcaaaccaacctgcttgcccttaacgcggccatcgaggcggcgcgggctggcgagactgggcgcggctttgcggtggtggccgatgaagtgcgtgcgctggccagcaagactcaaagctccacgggcgatatccaggcgcatatcgtcgcgttgcagcagggcgcgcgtgaggcggtggaaaccatcggcaaggcggggcgtcaggccaatgagggcttgctggtgctgcgcgacagcgtgcgtttgcagcagacggtacaggcttcggtggagcaggtgcatgcggctattggcctggcgacgcgtgcggccgagcatcaagcccagggcgcgcatgcggtgcgtgggcgcgtcgaggtaatccacgcccaggccgaacgtgcggcgcaggcggtggtggagacgacggccagtggcaaggtgctggatgggttggcggcgcagttgaaggcgagtttggggcagttcagggcttgaggttgtctggaccggcctcatcgcaggcaagccagctcccacattcaactgcattccaacgttggaactcggtcactgtgggagctggcttgcctgcgatagctgtttcagcgactcagatacatccgagtcgtgagcagatacaccggcaaccccgacaccagaattaacaacgccgcatacggcgccgccgccgcaaattccacattcgaggtatgcgcccagacggccgttgccaaggtattcaacccggtcggactgagcagcagcgtggccgtcagttccttcatcgcatccaggaacaccaacgcaaacgccgcacccaatgccgggaatatgatcggcagggtgactctgcaaaacgcactgaacgacgatgcgcctaatgtgcgcgcagcctcttccaactgtggcgccgccttgttcagcgctgtacgaatcggcgcctgtgccaacggcaaaaacagcagcgcataagcaatcagcaataacgccgaggtctggtacagggctggcacgtaatgcagggcgaaatacaccagggtcaacgcaatcaccaggccgggcagggcatgcagtaagtacggcaagcgttcggcccatatcgccagttgccctttgtagcgcaccaccagcaaccccaccggcactgccagtaccaggcacagtgcggcgccgcccagcgagagcgccagggatgacagcagcgcctcaccgatctcggccatcggaaacgctgccgacgaaccgactgccagccaatacccgagcatgcccaatgggataccactgccgatgatcgccagcgccaggcaatacacctggcccaatggcgcccacttgcccagtcgaacctgctcggcgtgtcgcgccgcgccctggccgatgcgcacgtgccggcctttgccgcggacgcgcagctccagccacagcagcgtcaggcacatcagcagcagcactgccgagagcatcgccgcattggcattgctgaattccagttcgaactgctgatagatcgcagtggtgaaggtctgcaagccgatgatcgacagcgcaccgaactcaaccagcatgtgcagtgcgatcaatagtgagccagccagcagcgatggccacagcagcgggagtgtgatgcgaaagaacacgccccagcggttgagccccagcgtgcgggccgactcttccagggaagggtcaagattgcgcagcgttgccgccaccggtagaaacaccagcgggtatttggacaggctcatcaccaggatcgcgccgccgagcccctcaaactgggcgctcaacgacacccaggtaaaactgctgacaaacgccggcaccgcaaacggcaggcacaggatcacgccccagatgcgccgtcctggcaggttgctgcgttccagcagccaggccagggacaggccgatcacgccgcaggtcagggttacgccgaccatcagcgccagggtgttgcgcagcagcccgaacacataaggccgccacagtagatgcaccgcctccgtccagcccgcctgccaggctttgagccctacataggcgagcggcaacaggctcaggccaaccagcaacagcacgggcagcagcagccagatcgacgggcgtttgcgacggggggtgaaccccgcgacggaaagcgatgggttcatcagttcaggccaacgtcacgttccagttccagggcttcttcggcgttgcccaggtctgcgggggtgacctttggtggctgcaactcgctaaatggcttgaggccgcggttcgattccatgcccttgcgcagcgggtactcggccgacgtgttggtgatcacgcgctggccttcttcgctggccatgaatgccagcagttgctgggcttctttgggatgcttgctggatttgagtgcggcagcggaggacacggtgatcaggccgcccgcatcaccatcggtgaagtagtgcagctgggagtccagattggttttttcctttttcagggcaaaccagtagtagttgttcaccagtacggtggccacttcgccgttttccacggccttgagggcgaccatattgttgctgtacaccttgccgaaggcgcgcaggccggtcagccattcttccgcggcttcgcgaccgtgcagcttgatgatcgccacggcttgttcctggaacgcgccgctggtgggcacgaaaccgaccttgccttgccattcggggccggcgaaatccagtaccgacttgggcaagtctttttccgcaatcaatttggggttgaaggctacgacgcgggtgcgtgcggtcacgcccatccaatcgccgtttttgcccacgtaatccttgggcagcacatcgagggtgctggcatcgatttttgccaacaggccttgctcgccgagtttattcagaggcggtgattcttcggtgtagatgacgtcggcaggggagcgctcaccttcttcgacgacctggctggccaactggttgctgctgcctttgcgcacgttgacgtggatgccggtcttggcttcgaaggccttggcgagttcatcgccgacttctttgtgttggccgttgtacagggtcagggagaccttgtcggcagaatgggccgcgtgcgagagcagggtcaggctgagtagggtgagggtcaggccgcgcagaagggatgtcttgagtcggttgtcacggatcatcatccgaagggttcctcgcttatatgcaacaaatcattgcaaggataaacgataaatcttctcaagtgcggatgagggaggcaatcaccgggaagttttcaaaccccggaaacgaaaaaacccgctttcgcgggtttgatctgaatttggtgcccaggagaagactcgaacttccacgaccttgcgatcaccagcacctgaagctggcgtgtctaccaatttcaccacctgggcattatctaacaacgttgccgctgttgatggggcgaactatacggcggggcttttgatctgtaaacccctgattcgaaaaatataaatcaatttttccgttaaaaatcaaaggcctgaaacgaaaaaacccgctttcgcgggtttgatctgaatttggtgcccaggagaagactcgaacttccacgaccttgcgatcaccagcacctgaagctggcgtgtctaccaatttcaccacctgggcagcatcaacaacgttgccgtcgtcgatggcgcgcactatacggagcgatatttgagctgtaaacccctgccatgaaaaaagcctggaaaatttcgccagtggtcgtgcaaggtgcgcgccgggggtcgcaaagagcttttaaacgcttgttgatacctgaaatttcccgtttcaatacgcgtatgccaaactaacccgcatatagacaaggtgaaaactctctaatggccgattggcagtccctcgatcccgaggccgctcgtgaagcggaaaaatatgaaaaccctattcctagccgcgaactgatcctggcgcacctcgccgatcgtggttcgcctgctagccgcgagcagctggttgaagaattcggtctgaccaccgaagaccagctcgaagccctgcgccgccgtctgcgtgcgatggagcgcgatgctcaattgatctacacccgtcgtggcacttacgcgccggtcgacaagctggacctgatcctgggtcgcattgccggccaccgtgatggcttcggcttcctgatcccggacgacggcagcgacgacctgttcatgagcccggcgcaaatgcgcctggtgttcgatggcgaccgtgccctggcgcgggtttctggcctggaccgccgtggccgccgcgaaggcgtgatcgtcgaagtggtgtcccgtgcccacgaatctatcgtcggccgttacttcgaagaaggcggcatcggcttcgtggtgccggataacccgaaggtgcagcaggaagtgctgattaccccgggccgtaatggcgcggccaaggtcggccagttcgtcgaggtgaaaatcacccactggcctactgcgcgcttccaaccccagggcgatatcgttgaagtggtcggcaactacatggcgccgggcatggaaatcgacgtggccttgcgcacctacgatattcctcacgtctggcctgaggctgtgctcaaagaagcggccaagctcaagccggaagtcgaagagaaagacaaagaaaaacgcatcgacctgcgccatcttccgttcgtcaccattgacggcgaagatgcccgcgacttcgacgatgcggtctactgcgaagccaagcctggcaagctgcgcctgttctccggcggctggaagctgtacgtggcgattgccgacgtttccagctacgtgaaaatcggttcggccctggataacgaagcccaggtacgcggcaactccgtgtacttccctgagcgcgtgatcccgatgctgcccgagcagctgtccaacggcctgtgctccctgaacccgaaagtcgaccgtttggccatggtgtgcgagatgaccatctccaaaaccggcgaaatgaccgactaccagttctacgaagcagtgatccactcccaggcacgcctgacctacaacaaggtcagcaccatcctggaaacgccgaagaccagcgaggccaaggccctgcgtaccgagtacgccggcgtggtgccgcacctcaagcagctgtactcgctgtacaaggtgttgctgggtgcccgtcatacccgcggcgcgatcgactttgaaacccaggaaacccgcattgtcttcggctccgagcgcaagattgcggcgatcaccccgaccacccgcaacgacgcgcacaagctgatcgaggagtgcatgctggcggccaacgtggccactgccgagttcctcaagaagcacgaaattcctgcgttgtaccgtgtgcacgacggcccgccgccggagcgcctggaaaaactgcgcgccttcctcggcgaactcggcctgtccctgcacaaaggcaaggacggcccgacgccgaaggattaccaggccctgctggccagcatcaaggaccgtccggattaccacgtgatccagaccgtgatgctgcgctcgctgagccaggcggtgtacagcgccgataaccagggccacttcggcctgaattacgaggcgtacacccacttcacttcgccgattcgccgttacccggacttgctcacgcaccgggcgatccgcagtgtgatccattccaagcagaacaccccgcacgtcaagcgcgccggtgccatgaccattccgaaagcacggatctatccgtacgacgaagcggccctggaacagctgggcgagcagtgctccatgagcgagcgccgcgctgacgaagccacccgcgacgtggtgaactggctcaagtgcgagttcatgaaggatcgtgtgggcgagtcgttcccgggtgtgatcaccgccgtgaccggttttggcctgttcgtcgagctgaccgacatctatgtcgagggcttggtgcacgtcaccgctttgccgggtgactactaccacttcgaccctgtgcatcaccgcctggcgggcgagcgcaccggtcgcagcttccgcttgggcgataccgttgaagtacaggtcatgcgcgttgatctggacgagcgcaagatcgacttcggcatgcctgacaaaccggctgagccagcgggtcgtaaaaagcgtggtgaaaccacagcgcctgcgtccaaaggcaaaacggccgcggcgaaaaccacggccgagccagcacctgccaaggccggtcgtcgttcttccgccaaggacaaggcccctgaagcctaccgcccaagcgacgccgcggcgaaaaacgccgagctgcgcaagagccgcgagttgaagcagcagttgctcaacgaagccaaaagcggtggtaaagcggcgtctgggggaaagtcccaaggggcggaaaaaccgtcgagcaagccaagtaaacaccgtaaaggcccgccaaaagcgggttcggctcccgcaaaaagcgacgggtcgcgcaaacctaaggccaagtcatgagtctggaaaaaatctacggcgtgcacgccgtagaagcactgctgcgtcaccaccccaagcgcgtcaaacaggtgtggttggccgaaggtcgcagcgagccgcgcgtacaggcgctggtcgagttggccacccaaaacaaggttgccatcggccaggccgaacgtcgtgaaatggacgtgtgggtcgaaggcgttcaccaaggcgtggtggccgacgtcagcccgagccaggtgtggggcgaggcgatgctcgacgagttgctcgaccgtaccgaaggcgcgccgttgctcttggtgctggacggcgtaaccgacccgcacaacctcggcgcttgcctgcgctcggcggatgctgccggtgcgctggccgtgatcgtgcccaaggacaagtccgcgaccctgacgccggtggtgcgtaaggtcgcctgcggcgcggcggaagtgattccgctggtggccgtgaccaacctggcgcgtaccctggagaagctccagcagcgcggcctgtgggtcgtgggcacggcgggggaggcggaggtcagcgtctatgaccaggacctcaccggcccgaccatcctgatcatgggtgccgaaggcaaaggcatgcgtcgcctgacccgtgagcattgcgattacctggtgcacctgccgatggccggtagcgtcagcagcctgaacgtgtcggtggcgacgggtgtatgcctgttcgaggcccagcgtcagcgtggtgcgaaagccaaggccaagcctaagaagtaattgcaatatggggcatgcctcaatcctaatgtaggagcgagcttgctcgcgaaaaactcacaggcgccgcgttcattcagggtgcgcgcgttatcgttgacgtttttcgcgagcaagcccgctcctacatttgtgtttgtggtgcttggagttgttcaaataatcaccaatcaccttgcgcccgttctcccccttctctacaattgcgccccttgccttcctggcaggcaccgatgtgcctcccctgcggcaagatccataagtgtcattcactccttgtctgaccgtttttgagcggcaggctacaacccgtaaggagcattcatgcgtcattacgaaatcatctttttggtccacccggatcaaagcgagcaagtcggcggcatggttgagcgttacaccaagctgatcgaagaagacggcggcaaaatccaccgtctggaagattggggccgtcgtcaactggcctacgcaatcaacaatgttcacaaggctcactacgtgatgctgaacgttgagtgcactggcaaggccctggccgagctggaagacaacttccgttacaacgatgcagtgatccgtaacctggtcatccgtcgcgaagaagccgttaccggccaatccgagatgctcaaggctgaagaaaaccgcagtgagcgccgtgagcgtcgcgaccgtcctgaagaaggcgctgatgatagcgttgaagacagcgacaacagcgataacgctgacgagtaatccacggaccttattaaggagcctatcaaatggcacgtttcttccgtcgtcgtaaattctgccgtttcaccgctgaagacgtgaaagagatcgattacaaagatctcaacactctgaaagcctacgtatccgagaccggcaaaatcgttccaagccgtatcaccggtaccaaagcacgttatcagcgtcagctggccaccgctatcaagcgcgcccgcttcctggccctgctggcctacaccgacagccacggccgctgagaccgggcagtcgacaagtagtaagggattgaatgcatgcgcgccttagctgagttcatcatgcgcggtcgcgtgcaggccactctggtagtggctggatgtgcggcattgccgttgctttattggttgggtgctgccgcaggttgccttgtgctgctgcggcgcggtttgaaggacgcccttggcgttcttgccctgggtttgttgccggccttgatctggtggctgcaaatgggtgatccacgggtacttctggtactgctggggtcatcgagccttgcgttggttttgcgcgcaagtgagtcctgggtccgtacgctgctggtcagcgtggcattggggttggtgtactcagtgatgcttggcgcggctttccgcccgcaaatcgaggcgctggcgcaggagatcgtcaagatcctgccgttggccctcggggatctctaccagcagttgtcggtagatgagcgagcgcggtttgcgtcactgattgctccggtcctgaccggcctgattgcggctttgttgcaggtcgtcagcgtgctgagcctgattcttgggcgttattggcaggcgttgttgtacaacccgggtggttttggtcgcgagtttcgcagtatcagaatcccagcggggccggcgatgttgctgctggcgtgcatggttgtcgggccgaacttcggcccacagatggccttgctggcgccgatttgcagcgtaccgctggtgtttgccgggctggccctgattcatgggcttgctgcgcaaaagcgactggccaggttttggctggtggggttgtacgtcacgctggtgctgttcatgcaactgatctatccgttactcgtggtcttggccattgttgacagcctgattgattttcgcggtcgtctggcgtcgaaagacgccgataacgcgaacggtgaaggttaaaagttagaggattttcacatgcaactgatccttctggaaaaagtcgccaacctgggcaacctgggcgacaaagtgaacgttaaggccggctacggtcgtaactacctgctgccatacggcaaagccaccgctgcaaccgctgccaacctggctgcgtttgaagagcgtcgtgctgagctggaaaaagccgcagcagacaaaaaagcgtcggccgaaactcgcgctgcccaactggctgagctggaagtgactatcactgccaccgctggtgacgaaggcaagctgttcggttcgatcggcacccacgacatcgctgatgcactgaccgcctccggcgttgaagtgcagaagagcgaagttcgtctgccgaacggcaccatccgcaacgtaggcgaattcgacgtagccgtgcacctgcacgccgaagttgaagccaccgtacgcgttgtcgtggtagcagcttaagtcgcacctaactgactggcacctcgcgtgccaggcggttaacatcgggcacgatcctgtttacaggtcgtgccttttgtttttctacacaccccaaattccaagtggccatgaacgaaatctccgctcctgagcaatacgatctacaaaccgctgccctgaaggtgccgccgcattccatcgaggccgaacaggccgtgctcggtggcttgatgctggacaacaacgcctgggaacgcgtgctggatcaagtctcggacggtgatttctatcgccatgaccaccgcctgatcttccgcgccattgccaagctggccgaccagaactcaccgatcgacgtggtcaccctggccgagcagttggacaaggaaggccagacctcccaagtcggcggcctgggctacctcggcgagctggcaaaaaacacgccgtccgtcgccaacatcaaggcctatgcccagatcgtccgcgagcgggccacgttgcgccagttgatcggcatcagcaccgaaatcgccgacagcgccttcaaccccgaaggccgcactgccgccgagatccttgacgaagccgagcgccagatcttccagatcgccgaggcccggccgaaaaccggcggcccggtcagcgtcaacgacctgctgaccaaagccatcgaccgtatcgacaccctgttcaacaccgatgcggcgattaccggtatttccaccggttacaccgacctcgacgaaaagaccagcggcctgcagccgtccgacttgatcatcgtcgccggtcgtccgtccatgggtaagaccaccttcgcgatgaacctggtggaaaacgccgtgttgcgcagcgacaaggcggtgctggtgtactccctcgagatgccaggcgaatcgttgatcatgcgtatgctctcgtcgctggggcgtatcgaccagaccaaggtgcgttccggccagcttgaagacgacgactggccgcgcctgacctcggcggtcaacctgctcaacgaccgcaagctgttcatcgatgacactgccggtatcagcccgtccgaaatgcgcgcacgtacccgtcgcctggtgcgtgagcatggcgacatcgccctgatcatgatcgactacctgcagttgatgcagatcccgggttccagcggcgacaaccgtaccaacgagatttctgaaatctcccgttccctgaaggcgctggccaaggaattcaactgtccggtggtggcgctgtctcagctcaaccgttccctggaacaacgtcccaacaagcgcccggtgaactccgacttgcgggaatccggagcgatcgagcaggacgccgacgtgatcatgttcgtgtaccgcgacgaggtgtaccaccccgagacggaacacaaaggcattgccgaaatcatcatcggcaagcaacggaacggcccgatcgggtttatccggttggcgttcatcggcaagtacacgcgtttcgagaacctggcgccgggcagctacaacttcgacgacgacgagtagtttcaagcacctgtaagggcttcatcgcaggcaagccagctcccacctttgggatgcattcccttgtgggagctggcttgcctgcgatggcgtcaccacaattccgactactgtcgtcggaattggtcaaattttgtgctatattccgcgcccgcgatttttcatctccacaccggtcaccgtcatgcaaacagccaagccgttatttgactatcccaagtactgggccgaatgtttcggtcctgcgccattcctgccgatgagcagggaggagatggatcagcttggctgggattcgtgcgacatcatcatcgtcaccggtgatgcctatgttgaccacccctcgttcggcatggcgatcatcggccggctgctggagtcccagggctttcgcgtcgggatcatcgcgcaaccgaactggcagtccaaagacgacttcatgaagctcggcgagccgaacctgttcttcggcgtcgcggccggcaacatggactcgatgatcaaccgctacaccgccgacaagaaaatccgctccgacgacgcctacacccctggcggcatggccggcaaacgcccggaccgtgcgagcctggtgtacagccagcgttgcaaggaagcctacaagaacgtgccgatcgtactcggcggcatcgaagcttccctgcgccgcatcgcccactacgactactggcaagaccgcgtgcgcaactcgatcctgatcgacgccaccgccgatatcctgctgtacggtaacgccgagcgggccatcgtcgaggttgcccagcgcctgtcgtggggccacaagatcgaagatatcaccgatgtgcgcggcaccgcgttcatccgccgtgacacgccggcgggctggtacgaagtggattccacgcgcatcgaccgtccgggcaagatcgacaagatcatcaacccgtacgtgaatacccaggacacccaggcctgcgccatcgagcaagaaaaaggcccggtggatgacccggaagaagccaaggttgtgcagatcctggccagcccgcgcatgacccgtgacaaaaccgtgatccgcctgccgtcggtggaaaaagtccgcggtgacgcggtgctctatgcccacgcgaaccgcgtgttgcacctggaaaccaacccaggcaacgcccgcgctctggtgcagaagcacggtgaagtggacgtgtggttcaacccgccgcccattcccatgaccaccgaagaaatggactacgtgttcggcatgccctacgcccgcgtaccgcacccagcgtatggcaaggagaagatcccggcctacgacatgatccgtttctcggtgaacatcatgcgtggctgcttcggcggctgcaccttctgctcgatcaccgagcacgaaggccgcatcatccagaaccgttccgaagagtcgatcattcgcgagatcgaagagatccgcgacaaagtgccgggcttcaccggcgtgatctccgacctcggcggcccgacggcgaacatgtaccgcatcgcctgcaagagcccggagatcgaatccgcgtgccgcaagccatcatgcgtgttccctggcatctgcccgaacctgaacaccgaccactcgtcgttgatccagctgtaccgcagtgcccgtgcgttgccgggtgtgaagaagatcctgatcgcttccggcctgcgctacgacctggccgtcgaatcgccggagtacgtcaaagagctggtcacccaccacgtcggtggttacctcaagatcgccccggaacacaccgaggaaggtccgctcaaccagatgatgaagccgggcattggcagctatgacaagttcaagcgcatgttcgagaagtacaccaaggaagcgggcaaggagcagtacctgatcccgtacttcatcgccgcccacccgggcaccaccgatgaagacatgatgaacctggccctgtggctcaagggcaatggctttcgcgccgaccaggtgcaggcgttctacccgtcgccgatggccaccgccaccgcgatgtatcactcgggcaagaacccgctgcgcaaggtcacctacaagagcgacgcggtaaccatcgtcaagagcgaggagcagcgccgcctgcacaaggcgttcctgcgttaccacgacccgaagggctggccgatgctgcgtgaagcattgacccgcatgggccgtgccgacctgatcgggtcgggcaaggaccagctgatcccgctgcaccagccgtccaccgacagctaccagagcgcccggcgcaagaactcgacgccggcgggcagccataaggtcgccaaggaaaccaccaccaagatcctcacccagcataccggcctgccaccccgtggcagcgacggcagcaacccgtgggacaagcgcgagcaagccaaggctgcggcccaggcgcgcaacaagcaggcggccaaagagcgcagcgatgcggccaagggcaagggcggcaagcctacgcgcaagccggttgtgccgcgttgatcgacgcctgaaatgcaaaacgccagcctcgtgctggcgttttgctttctggtcggtgctgagtctgtttggtaaggtggcgcccattagattgctatcgcaggcaagccagctcccacacttggaatgcattcccctgtgggagctggcttgcctgcgatgaggccggtctgggcactctcaatttcaaggaagaacacttatgggcaaccccttgctcaacattggcatggactccaatcgctcccaattcatggcgcgccagcgcattgaaagccagatcaacctgccacggctgttcgccgtcatcgacgccgaccccagcatcgtcggtgctggtgtggtgtacatcgacgccgacttcaacgtaatcaccctgcgcgaattcaagcccatctgcagcatcaagcccaagcgcgtcattttgcgcgaggcgcagaagtacatctcgccggcgcagtttgtcgagcaggtgaagaccgacccccgtgaagggcgcctccagaaggaagcctttgatatgggcctttcctgtggcgcagcggtgatcggctggatcgtggtgttcagtggcagcgtcgccgtacccttcaccgccggcgccagtgcttttgtggtgggcattggcgtcacggccgcgctggccagcagtgctcagtgcggatttggcgtggcccgtacctataacgagatccttgacccggatgccaacgaccgcatggacgacgcccagtggtatggcgcggtgtcaccaattctcgatgccgcgtcgctggtgggtattggaacgggcgccttcaccacattaaggctgctcaaggccaaaaaagccgctgcgttgggcaagagctggtatgagttgctcaagggcttgaatcgccaggagcgcaagaaattgacccaggaattgctcagcctcaaagacccgagcctgacccccaagttgctcaagttgcagcagcgcgccggcacgttgcccaagcgctacagctccacggaaatccgtcatgccacgctcacccagctcaaggacgccttgggcggcatgttgggtatctggggcagctatcggaccggtcacgtcggctcggcgtcgacgcttgccattggcctgtatgaggaactgacagaatgaaggggtttcccgataggcgtagtttccttgcgcgttattttccggtgttcatgggcaccatcttcatggcgattttttccggttcagtcgccgtgtccaccgcgggcgtgacctatttgcgcggggttgagccggcgctcaaaaccgactactccggggctgcaatcctggtgctggtggcggtgctggtgtttggcaatgtgatgatcgcacgcgggtatccctgggcaacccggctggtggcgggttacctggtgtgttgcctgctgtttgtgttgccgatgattcaatacggcctcaataccctggtgtacggctcggcggtgctgtttccgctgctgggcttgctgctgctcaacagtaagcgccatcgtgaaatgcgccagcggttactcgaaatacgtcacctgcgtcgggcggcgattgcgcaacgcaaggcccgttgattaggtaggtttattggcggtaggtggcctgtttgttagggtggcgcccatcagattgctatcgcaggcaagccagctcccacaggggaatgcatttcaagtgtgggagctggcttgcctgcgatgaggccggtctgggcactttcaatgtcaaggaagaacacttatgggcaactccttgttcaacatcggcatggattccaaccgctctcaatttatggcgcgccagcgcatcgagagcctgatcaacctgccacggctgttcgccgccatcgatgccgaccccgccattgtcggtgcaggtgttgtgtatatcgatgccgatttcaacgttgtcaccctgcgcgagtttcagcccatctgcagcatcgcacccaagcgtttgatcctgcgtgaggcgcagaagtacatcgcgccaacgcaattcgctcagcaggtgcaagacaatccgcgtgagtcccgcttggtgggcgaagcggtcaataccacgctatcgtgtgccggcgcggtcatcggttggattgtggtgctcagtggttccgtcgcagttccgttttcggcgggggccagttcggtggtcgtggcgctcgggtatacggccgcggcagccagttctgtgcagtgctttgccagcggctatcgcaccgtcaatgagatccgcaaccccgcgcgaaatgatcagctcgacagtgaggaatggtaccaatacaccatgattgccctggacgcggcgtcgttggttggggtgggctcatcggcattggcaacggtcaagctggtgcggttgaataaggcctctaccgggaaaagtgtgagagaggtgctcaggggcctgaatcgacaggagcgcgccaagttgaccaaagagctgctgagcatcaacgacccacgcttgacgtccaagatgatcaagttaaagcagttgtcgggcgagttgcctaagcggttcacccccaccgaggtcaagcatgcaacggtcacgcagatcaaggacgcgttgggcgcagccatcggttttaccggtagtgcggtgtcagggaacgtgcgcacaattgccatagggctgtatgaggaggccgagcaatgaacgagctgcctagcattcgcagttttctgtcgacgtatttccccgtctttgtgggggcgatatttgtctgcattttcaccctcgtgtttgcggttccggtgttcttcgatagctatatgccaagcctgtccatggcagataacgccaagtactccttcctggtgggtatcgcactcacgctagtcattgtgcactgcaatttcatgattgcacgcgggcgtccccaatggatgtggccgctagtgttgctgttggggggatgctttctgggtgtattgccaacactcaatgatcagccgaacggggtggtatatgccttgagcctggtgtttccattacttgggctgttgctgttcaacagcaaacgtcaccgtgaaatgcgccagaaactggtcgaagttcgctgcctgcgccaggccatgattgcccaacacaaacaccattgattgggtagattcaccacctgccctcagcccggcgctacaaatgtgtgcagcgcctgcaccatagccgcaacgttggcgctgttttggtgctgtactgcaccgggcctgacgttttagtgcaatgactgctgctgtggcataagtcttgcgcgcgttgtgcttatgccctggctcgcaggaggccgccgtgtcgattcatgtcgcgttgcaccacgttacgcattaccgctacgaccgtgcagttgaactcggcccgcagatcgtgcggctacgcccggcggcccatagccgtacgcggatactgtcctacgcgttgaaggtgttgcccgagcagcatttcatcaactggcagcaagacccccagggcaattacctggcgcgcctggtgttcccggaaaagactgacgagttgcgcattgaagtcgacctggtcgccgagatggcggtgttcaatccgttcgattttttcctcgagccctacgccgaaaatatcccgttcagctacgccgccgatgagcagcgcgagctggcgccgtatctggaaaccttgccgctgacgccaaggttggctgcgtacctggccggtatcgaccgcacgccgctgcctgctgtggatttcctggtcggcctcaaccagcgcctggccgccgatatcggttacctgattcgcatggaaccgggcgtgcaaactccggaatttaccctggaaaacgcatccggctcttgccgcgactcggcctggttactggtgcaattgctgcgcaacctcgggttggcggcgcgatttgtctccggttacctgatccagctcaccgccgacgtcaaagccctcgacggcccgtccggtaccgaggtggatttcaccgacctgcacgcctggtgtgaagtgtatttgcccggcgctggctggattggcctggatgccacgtccgggttgtttgccggtgaagggcacatccctttggcctgcagtcccgatccatcgtccgccgcgccgatcagtgggttggtggagccgtgcgagtgcgaattcacccacgagatgtcggtggagcgcatttgggaagcgccacgggtgaccaagccctataccgaagaacaatggctggcgatccaggccctgggccggcagattgatggcgacttgctcaaggacgacgtacgcctgaccatgggcggcgagccaaccttcgtctctatcgacgaccccgacggtgccgagtggaacaccgcagccctgggcccggacaagcgtcgcctgtcggccgagctgttccagcgcctgcgccagcactatgcgcccaagggcctggtgcatttcggccaaggcaagtggtaccccggcgagcaactgccgcgctggtcgctcaattgctactggcgccgcgacggcgtgccgatctggcacaacagtgcgctgattgccgatgagcaagaggactatggcgccgatggggtgatggccgggcgtttcctggccagcgtcgccgagcgcctcaaactaccggcgcgctttgtgttcccggcgttcgaagacaatttctactacctatggcgcgaaggggcgctgccccagaacgtcactgcccaggacccgcgcctgagcgacgacctggagcgtgaacgcctgcgtaaagtgttcagccagggcctggataaagtcatcggccaggtgctgccgctggcacgtactgcggccaatgaccgctggcagagtgggcgttggtacctgcgcgataaccattgccgcctggtgccgggggattcgccgctgggctatcgcctgccgctcgcctcgcagccctgggtgactgcggcggagtatccgtttgtgcatccgaccgaccctaaccaggatcagccggatctgccgaccagcgcccagttgcaaaaccatggcgagcccgcgccggttgatgatcgtgtgcccaagattgacgagtccgccgactggctgacccgtaccgcgctgtgcgccgaagcacgggaagggcgcctgtatctgtttatgccgccgctggagcgcgtcgaggattacctggagctggtgactgccattgaggccaccgccgaagagctgcattgcccggtactgctagaaggctacgagccgccagcggatacgcgcctgagcaatttccgcgtcacgccagatcccggtgtcattgaggtcaacgtacagccatccgccacctgggacgagttggtggaacgcaccgaattcctctacgaagaggcacggcaaacccgcctgaccaccgagaagttcatgatcgacgggcgccataccggcaccggtggcggtaaccacttcgtgctcggcggcgcgacgcccaaggattcgcccttcctgcgccggccggacctgctacgcagcctgatcagctactggcacaaccacccgtcgttgtcctatttgttctccggcctgtttatcggccccacctcccaggcgccccgggtagatgaggcgcgcaacgatgcgctgtatgaactggaaatcgccttcgcgcagatgccggagccaggcgaggagtgcccgccgtggctggtggaccgcctgttgcgcaacctgctgatcgacgtgacgggtaatacccatcgcgccgaattctgtatcgacaaactttactcaccggacggcgccactggccgcctggggctgctggaactgcgcgcctttgaaatgccgccccatgcgcgcatgagcctgacccagcagttgttgctgcgggcgctggtcgcgcggttctggcgcgagccctatgcgccgccgaagctggcgcgctggggcactgagctgcatgaccgtttcctgttgccgcactttatcgagcaggactttgccgacgtgatcgtcgagctgaacgcggccggctatccgctgcgtgccgaatggttcgcggcgcacctggagttccgtttccccaaggtgggcgactacgccgtcagcggtatcgaactggaactgcgccaggccttggagccttggcacgtgctgggcgaggagggcgctgtggggggcgcggtgcgttatgtggattcgtccctggagcgcctgcaagtgaagttgagcgggttgccaccgcaacgctacctgctgacctgcaatggcgtgccggtgccgctgcaagcgaccggccgcgtcggcgagttcgtggcgggcgtgcgttaccgcgcctggcagccggccaactgcctgcaaccgaccatccccgtgcatgcgccgctggtatttgacctgctcgacacctggatgcagcgttcgttgggcggctgccaataccatgtggcgcacccgggcgggcgcaattacgacagcctgccggtgaatgccaatgaggcggagagccggcgcatggcgcggtttttccgcttggggcatagcccgggcaagctgccagtgccgactgtaacggtaaacgatgaattgccaatgacgctggatttgcggcgtttcaaaaaaaataaggaatgaacatgatttaagtgtgggagctggcttgcctgcgatagcggtggttcagtcgataattctggtgactgatacaccgctatcgcaggcaagccagctcccacattggatcgcagtgaatttgagttaacctgacttcccttgcctctgccgagcgttccatgtccgacttgctcgaccgttacccgctgaccgcgggcacctatcacgaactgctggatgccagcggcgcggtgcgtgcccattggcgacgcttgttcgatcacctgcaacgcagcacgcccgcacaactggcccagcgccaggcgttgctgacgcgccagatccaggaaaacggcgtgacttacaacgtctacgccgaccccaagggtgccgatcgcccctgggagctggacctgttgccccatgtgctggccgccgaggaatggcagcaactgtcggccggcatcgcccagcgtgcgcgcctgctcaatgcggtgctggccgacctgtatggcccgcagcgcctgatcaaagaaggcttgctgccggccgaactggtgttcgggcataacaattttctgtggccgtgccagggtatccagccgcccgacggtgcgttcctgcatctgtacgcggtcgacctggcgcgtaccccggatggccgctggtgggtcaccgccgaccgcacccaagccccgtcgggcgccggctacgccctggaaaaccgcaccatcgtgtcccgcgccttcccggacctttaccgggatatgcaggtgcagcacctcaccgggttctttcgcacgttgcaggaaaccctggcgcgccaggcccctggcgatgaccagccgccactgatcgtgttgctcacgccggggcgtttcaacgaaagctatttcgaacacctgtacctggcgcgccagctcggctaccccttggtcgagggcggcgacctcaccgtgcgcgacagcaccgtgttcctgaaaaccctcagcggcctgcgccgggtacacgcgatcatgcgtcgccttgatgatgatttctgcgacccgctggagctgcgcaccgactcggcgctcggcgtgccgggcctgctcgacgccgtgcgccaaggcaatgtgctggtggccaatgccttgggcagtggtgtgctggaatccccggggttgctgggctttttgcccaagatcaacgaatttttattcggtgaagccttgatcctgccgtcgattgccacctggtggtgcggcgaagcgccggtgcttgccgaagccctggagaagctgccggagctgttgatcaagccggcattcccctcacaaagtttcgccccggtgtttggtcgcgaccttgatgacgaacagcgccaggccctggccgaacgcatgcgtgcgcggccctatgcctatgtcgcccaagagttggcgcaactgtctcaggcgccggtctggcacaccgtggatgaccacctgcaacaccgtgccattggcatgcgtgtctacgccgtggccagtgaagacggttatcgggtgctgcccggcggcctgacccgcgtggcggccgacgctgatgccgaagtggtgtcgatgcagcgcggcggggcgagcaaggacacctgggtgctcggcgaacgcgcgccgggtggcgagcagtggcgcgcccaacgcaccattggcgcctatgacctggtgcgccgcgatccctatctgccctcgcgcgtggtggaaaacctgttctggttcggtcgttactgcgagcgctgcgacgacagtgcgcgctggctgcgtatcgtactggcgcggtatgtcgatggcgatgatccgctggcgctgcaggccgccgtcgaactcggcgaaagcctgcgcctgttgccggaggagggcgagttgccggagcgtctgctcgcggccttgctgggtgatgactggccttcaagcctgcgcgccaatttgcagcgcttgcagtgggcggcgtcccaggtgcgcggtaagttgtcccgggaaaactggcaggccctggtggagttgcaacgcgaagccattgagctggaaagcgacgctgcggactttggcgagctgctcgactttctcaaccgcttagtgatgtccctggcggcgctgtcggggtttgccctggacgacatgacccgcgatgaaggctggcgcttcttgatgatgggccggcgtatcgagcgtctgcaatttctgagcagcagccttgcggcgttcctgcgcggcgtggcggtattcgatcaggccgggctggaatggttgctggagctgggcaacagcagcatcacctaccgctcgcgctacctggcagtgccgcagttgatcccggtgctcgacctgctgctgctcgacgaacagaacccccatgcggtgctgttccagctcaagttggtgagccgcaccctgcgccgtctcaatgatgattttggcgtgccccgtgaaaccgggctggcgcctttggtcgagcgcctggcgcgctttgacctgggctgcctggagaacggcctgtttggcgaaaccagcgtgcgtgccgccctggatggtctggccgacttgctgcaagcggtggccgatgaaagcgggcaagtgtcggatcgcctggcgttgcgccattttgcccacgtcgatgatgtcagtcagcaaacggtgtcggtgtaatgagcgcgcgctatcagattttccacgatacccattaccactacgacagcccggtgtccctggcccagcaactggcgcacctctggccaaggccgtgcgcctggcagaagtgcacctggcagcagttggatatcagcccggaacccacctcgcgccgcgatgagctggacgtgttcggcaacccgatcactcgcttggcgttcgaacggccccatgatgaattgctggtgaacgccgggctcaccgtggaagtgctggcgcggcctgttttggactttcagcgatcgccgccctgggaccacacccgtgacagcctgacctacagcagccagcccctgagcgccgagctgatcgaagcctgccgctatcgcttcgagtcgccctatgtgcatctgaagaaaaccttcgtcgagttctccgaaagctgcttcccgcccggcgagcctttactgctgggcacgcaggcattgatggagaagatcttcagcgaatttaccttcgatgccgaagccacccaggtcgccacaccgctggtggaagtgctggagcgccgtcgcggcgtgtgccaggacttcgctcacctgatgcttgcctgcctgcgttcccgtggcctggcggcgcgctatatcagcggctacctgctcacccagccaccgcccggccaaccacggctgattggcgcggatgcgtcccatgcgtgggtctcggtgttttgcccggtatcaggctgggtggattttgacccgaccaacaatgtgcagccggcgctggagcacatcaccctggcctggggccgggacttttccgatgtgtcgccgttgcggggggtgattctggggggaggcagccacgacccggaggtgcgggtgacggtgatgccgctggaatgaaaaacgatcattcccacgctctgcgtgggaatgcctgctgtgacgctctgcgtcacccttgcgctggcttcaagcctggtgcgggacgcggagcgtccggggctgcattcccacgcggagcgtgggaacgatcattcagctgggtctttcggggtttcggtctcgtcagttgccgcttcaccttcggcatccgggttcagcgcaccggcttcttcgtctgcagcggctttcttgcgttgcagcttttcctctttcttctgttccttggccaagtctctctgacgtttggcgaaggagtaattaggtttggccatgggcgatcctctagggtcgaaggtgagggtgggcggcgcgcagctgcctcgggtcgtcatggtagcagcttcagggtgccctttgctttcacttaccgcaggcgtaggcagccagaagcccgttgaacaggtgatgaaggtgcatggcatgaactccgtgagtgatgggccgatcataatcagggtgcggcagtttggctggttgattgtgttgatgaagctgatagcctaaagttgtatacaatctgttgattcagatcataagaactcaagcctgattgaggcaccctaccgcaatccgcgtttttaaaaccctgccttggagattcacatgtttgccaaactcgttgctgtttccctgctgactctggcgagcggccagttgcttgctgcagagtgcaaggtcactgtcgactccactgaccagatgtctttcaacaccaaagaaatcaccatcgacaagagctgcaagcagttcaccgttgagctgactcactcgggcaacctgccgaaaaacgtgatggggcataactgggtgctgaccaccgacgccaatatgcaaccggtggcaaccgacggtatggctgcggggatcgacaaggattacctgaaagccggtgatgagcgcatcatcgcccacaccaagatcatcggtgctggcgagaaagactcggtgaccttcgacgtctccaagctgaaggccgatgagaaatacagcttcttctgctcgttcccaggccacatctcgatgatgaaaggtgctgtggttctgaagtaagaccgcgttatcgttcatcgcaggcaagccagctcccacattcgaccgcattcccatgttggaatccggtcaagtgtgggagctggcttgcctgcgatggtgatctgacaatcaatgtaaaacgatcaggttcacctcaaggcgcaaacggcatcacccgcttgtgctcagtcttgcgataggtatcgcagataatcttgaacgcctcttcacgcaccggctcaccctgcaggaacgcatcgatctcggcataggtcaccccatgtgacgcctcgtccggcttgcccggcgacaggtcttccaggtcagcggtcggcaccttctccaccagcgattccggcgcgccaaagtggcgggcaatggcacgcacctggtgcttcaccagcccgctcaacggcgccaggtcacaggccccgtcaccgaacttggtgaaaaagcccatcaccgcttctgccgcatggtcggtgccgatcaccaggccgcccgccgcgccggcgatggtgtactgggccaccatgcgcatgcgcgccttggtattgcccagcacgaagtcacgggacgccgcggccttgccttcaaaggcggccacttcattggccagggcttttactgccgggccgatgttcacggtgtggcgttcgtccggctcgataaagtccacgcaagcctgggcgtcgtgttcgtcgaactgggtttcgtagggcaggcgcacggcgataaaacggtacgcctcatcaccggtgctggcgcgcagttcctgcatcgcacgttgggccaagaggcctgcggtcagggaatcgacaccgccactgatgccgagcaccagggtcttgagcccggaattgcgcaggcagtcctggataaaggccacgcgccgggcaacttcggcttcgagtgcggcctggtctttgaacggggcttgcaccttgagctgttgcgcaatctcacgctgtacggcttgcatgattcactccttgctggatagggcaggtactttgaaaacgtgacgcaaataggcgacaaaattcgggtcggtgcaatgggtcttgcccgcttcatcggagatcttcgcgacgggctggccattgcaggcggtcattttaagcacgatgctcatcggttccacccctggaatatcacaggtcaggttggtgccgatgccaaagctcacattaatgcgaccacgcaatgcgcggaatatttccaacgccttgggcaatgtcagactgtcggagaacaccagggtcttgctcatcggttcgatgcccagcttgtggtagtgagcgatggctttttccgcccactggattggatcgccggagtcatggcgcaggccgtcgaacagcttggcgaagtacaagtcgaagtcgcccaggaacgcgtcggtggtgatgcaatcggtgagggcgatacccagcaggccacggtactcgcgcacccaacaatcaagcgcggcgatctggctgtcgatcaggcgcgggccgagttgctggtgggccatgatccactcatgggccatggtgcccagcggcttcatatcgaattcgcgcgccaggtgcacgttgctggtgccgacaaagcgcccagggaaatcgtgcttgagcacgctgaccacttcctcttgcacccggtaggaaaagcgccggcgcgtgccgaaatccgccacttgcagctccgacagctcgtcgctgctggcattggcggtcagccagtcgaacttgcgatacagctgctcgcgggcctgttcaaggatcacggtctggtagcggtagcggttacgcacctcgctgacgatggccagcatcggcacttcaaacaggatcacatgcagccacggtccgcgcaggcggataaacaactcgccgttctcgatgccggtttgcacataccgcaggttgaagcgaaacagcccgaggaagcgcagaaaatccggcttcataaagctgatgcgttccaggaaccccagttgatcggggctcaggctcagctcggcgaggcgctcgatctggtaacggatctccgccaggtaaggacgcaggtcttcactgttacggcaacgaaactcccattcaacttccacgttcgggtagttgtgcagcaccgcctgcatcatggtcagcttgtagaagtcggtgtcgagcaggttctgcacgatgcgatcggcaaacacactctcgctcataacgggaatctccagacgggtcggcgatggaggccggcctttacgcgcaattgaggaagggggttagtggcgcatagacctgtgggggattgccagtgattttttcagtaaggccactggcgccatcgcaggcaagccagctcccacctttgaaatgcgttccaaacggtgggagctggcttgcctgcgatggcgattctccaggcgctaaagcacctgctccatcatccacttcacaaattcgcgcaccttgggcacctccgccgaatgctcaggatacgccaggtaataagcatcctggctgggcatcccatgctgccagggaatcaccagcttgccctcggccaattcctcctccaccagaaagcgcggcaacagcgccacgccgcaccccacctgcgccgcacggatgcacatgtagaacgtgtcgaaccgcggcccgtggtaactgtgctcggtatgaaagccctggctggcgaaccagtcatgccagccctgaggccgcgaggcgttttgcagcagcaccaggtcgctcagttgcgtggggtcggtgaaaggctgggcgggcaggctgtcgggcgaacacaccggtaccagctcttcactgaacagtttcaggctctcggtgccagggcgtgcgccctggccgaaatagaacgccatgtcggccttgccttgcagtaactcgtccgggtcctgttcgttgcacaggtccaggtggatctgcgggtggcgcaaacgccagcctttgaggcgcggcaccagccagcgtgctccgaaggtgtagggcgtggacacgcgcagcacttcggtttcgcccccgtaggagcgcaggtagtgggtggacatttccacctgggtgaggatcttgcgcacttccaccaggtacaggtcgcccgccggggtcatctgcaagcgccggcgcacgcggcgaaacagcaggtgttgcaacagttcttccaactgcgccacctgtttgctcaccgcgctttgggtgaggttcagttcctcggcggcgcgggtgaagctcaggtggcgggtggccgcttcgaaacactgcagggcggtgatcgagggcaaatgtcttttgttcagcacggcatgcctctttttattctttgcatgaataaagggaatgatatctcgcctaatcgtcgtttgttggcaagtcttgggccagctacaaatagggccaggatcgccgtgcgtattgcggcgcgaatttttgtatgcagatttgaaggagtgacccatggttgccgcattgcttgatcgtctcggggtaaacccggcgctgtaccaggccgggaaacaacccgtgcattcaccgattgatggcagccgtatcggcagtgtccattgggaaggcgccgccgaggtggagcaacaggtcagtcgcgccgagcatgcattcgaggcctggcgcaaggtgccggcaccgcgacgtggcgagctggtgcgccagttcggcgacgtattgcgcgaatacaaggccgacctgggtgaactcgtttcctgggaggccggcaaaatcacccaggaaggcttgggtgaagtgcaggaaatgatcgacatctgcgacttcgccgtgggcctgtcgcgtcagctgtacggcttgaccatcgcctccgagcgcccaggccaccatatgcgcgaaacctggcacccgctgggcgtggtcggcgtgatcagcgccttcaacttcccggtggccgtgtgggcgtggaacactgcgctggccttggtgtgcggcaacgcggtgatctggaaaccgtcggaaaaaaccccgctcaccgcgctggcctgccaggccttgttcgagcgcgtactgaagaaattcgacggtgcccctgagtatctcagccaagtgatcattggcggccgcgacgccggcgctgcgctggtggatgacccgcgcgtcgccctgatcagcgccaccggcagcacgcgcatgggccgtgaagtggcacccaaagtcgccgcgcgtttcgcccgcagcattcttgagctgggcggcaacaacgcgatgatcctcggcccaagcgccgacctggacatggccgtacgcgccatcctgttcagcgcagtgggcaccgccggccaacgctgcaccaccctgcgccggctgatcgcccatgagtcggtcaaggaagaaatcgtcacccgcctcaaggccgcctattccaaggtgcgcatcggccacccgctggaaggcaacctgatcggcccgctgatcgacaagcacagcttcgacaacatgcaggacgcccttgagcaagccttgagcgaaggcggcaaggtgttcggcggcaagcgccaactgcaagacacattccccaacgcctattacgtatcgccggccatcgtggaaatgcccgagcaaagcgacgtggtgtgcagcgaaaccttcgcgccgattctttacgtggtcggctacaccgacttcgccgaagccctgcgcctgaacaacgccgtgccgcaaggcttgtcgtcctgcatcttcaccaccgacgtgcgtgaggccgagcagttcatgtcggcggtgggcagcgactgtggcatcgccaacgtcaacatcggcccgagcggcgcggagatcggtggcgcgttcgggggtgaaaaagaaaccggcggcgggcgtgaatcgggctcggatgcgtggcgcgggtatatgcgcaggcagaccaataccgtgaactactcgctggaactgccgttggcacaaggcatcacgttcgactgaccagactgatcgttcccacgctctgcgtgggaacgcattctgtgacgctccgcgtcacgacaatgcggacgcggagcgtccaaggctacattcccacgcagagcgtgggaacgagcggtggtgaattcatcccggagtctggcaatggcactgcgcgaaacatgtttatgggaacacctcaccccaggccgcccgaaccgagccgcgctcaagggcgcggtcaaggtggatgtgtgcgtgatcggcgccggcatcaccggtttgtcggcggccattcatttgctggaacagggtaaaagcgtcgccgtactggaggcccatcgcaccggccacggcggttcggggcgcaacgtcgggctggtcaatgccggcctgtggattccaccggacgagatcgaggccggtttcggtacggcggtgggcagccagctcaaccgcatgttgggtgcggcgccgtccctggtgttcagcctgatcgacaagtacaacatcgactgccaattgcgccgtgaaggcaccttgcacatggcgcacaacgcccgtggcgaggcggacttgcgcagccgtgagcagcagtggaaacgccgtggcgcgccggttgagttactcaccggccaggcctgcgagcacgccaccggtacccgcaaaatcgccgccgcattgctggatcggcgcgccggcaccttgaaccccatggcctataccacggggttggcgaatgccgccgtggggctgggcgggcaattgttcgatcattcgccggtcacccagcttgagcgccaaggcgccgattggtcggtacagactgccgagggcgcggtgcaggccgcgcaggtggtgatcgcctccaatgcttacaccgagggcgaatggaccgagctgcggcgtaacttcttccccggctattactaccaggtggcctcggcgccgctgaccgatgacgcggccaagcaaatcctccccggcggccaaggctcatgggacacccgccaggtcctgagcagtattcgccgcgatgccgatggccgcctgttgctcggcagcctgggcaatggcaaccagaaaccggcatggtttctcaaagcgtgggccgatcgggtgcagcaacactacttcccgtacctcaaaccggtgcaatgggaatacacctggaccggctgcatcgcgttcacccctgaccacttgatgcgcctgttcgaaccggcccccggcctggtggcggttaccggttataacgggcgcggggtgaccaccggcagcgtggtgggcaaggcgtttgccgactacctgtgtcaccaggatccccaagccttgccgatcccctttgcccctatgcagcccctggccggggtaggcctgcgcagttgcctgtatgaagccggcttctcgctctatcacgccgggcaatgcctgaggatcgtgatctgatcagcgaaatacccctcagaagcctgcattttcttagcaggctacccatctgtattggtgcaagtcgtagcaatcacgcactgtaaatgtgcagttccgttacgcacgttgttacagctgtaggaactgtcgtttatgcctgtggttgcaggtgcgacctgccagggttgtacttttttgcagtgttggttgcacctgtagacgctagacggttgcacgtcctggcaaaaggcgtcgaaacgcctgtaataacaatgacaccgtgtctttttgaagaataaaaacgtaatggcacgcggcttgctctgagctttcggtgaaaggtttgaatgcaagttgtcgtgccaaaaatcaaaaatatcggagcaccactcatgtcccagacgttttacaagaaaggttttctggccctcgccgttgctgcggcgctgggtgtttctacgtttgttcaagctgatgtgaaaattggtgtggcgggcccgatgacgggtgccaacgccgctttcggtgagcagtacatgaagggtgcccaggcggcagccgacgttatcaacaaggccggcggcatcaacggcgagcagatcaagctggtggcgggcgatgacgcctgtgaacccaagcaggccgtggccgtggccaaccgcctggccgaccaggacaaagtgatcggtgtggtcgggcacttctgctcatccaacaccatcccggcgtcggaggtttacgacgaagcaggcatcatcgccatcaccccaggctccaccaacccacaagtgaccgaacgcggcctgggcgccatgttccgtatgtgcgggcgtgacgaccaacaaggcatcgtcgccggcgactacatcgtcgacgtgctcaaaggcaagaaagtcgcggtgatcaacgacaaggacacctacggcaaaggcctggccgacgccaccgcagcccaactgaccaagcgcggcgtcaagccggtgctggaagagggcctgacccgtggcgagaaagacttcagcgccctggtcaccaaaatccgttccctgggcgccgacgtcgtgtacttcggcggcctgcacccggaagccggcccattggtgcgccagatccgcgaagcgggcttgaaagacgtcaagttcatgtccgatgacggcgtggtcaccgacgaactggtagccaccgcaggtggtgcgcagtacgtcgatggcgtgtacatgaccttcggcgccgacccgcgcctactgccagacagcaagaccgtggtggaagagttccgcaaaaacggcaccgagcctgaaggctacactctgtacgcctacgcctcgatccaggccctggccgccggtttcaacggtgccaagtccaacaagggcgaggatgctgccaagtggttgaaggctaacccggttaaaaccgtcatgggcgaaaaagcctgggatgccaagggcgatctgaaagtctctgactacgtggtttaccagtgggacaaagacggcaaataccatcagttggaaaagcagaagtaataacgcgacggcttgaacacctcgatctctgtgggagccgggcttgcccgcgatgacggcctcaataccaacacctgtgttgaatgtgaaaccgctatcgcaggcaagccagctcccacagagggccaggttgcctgctctattgcaacaaacctgtcttttcctccagaagcgccgcacacccccaggtgtgcaggtgctcaccgcgtgagattgcgttatggatggtattttcctgcagcaactggtcaacggcctgaccctcgggtcggtctatggcctgatcgccatcggctacacaatggtctatggcatcattggcatgatcaacttcgcccacggcgaggtttatatgatttccgcttacctcgcggcgatcagtctggcactgctggcttacttcggcatcgaatccttcccgctgctcattctcggtaccttgatcttcaccgtggtcgtcactggcgtgtacggttgggtgattgagcgtgtcgcctacaaacccctgcgtaactccacccgcctggcaccgctgatcagcgccatcggtatctcgctgatcctgcagaactacgcgcagatcgcccagggcgccaagcaacaaggcattcccaccctgctggccggcgcctggcgcgtcgatatcggcaccgggttcgtgcaactgacctacaccaaagtgttcatcctcgtggcggcgttcgccggcatggccttgctcacctacatcatcaaatacaccaagctcggccgcatgtgccgcgccacccagcaagaccgcaagatggcctcgatcctgggcatcaacaccgaccgagtgatctcctacgtgttcgtcatcggcgcagccatggctgccctggccggcgtgctgatcaccctcaactacggcaccttcgacttctatgccggcttcatcatcggcatcaaggcgtttaccgcggcggtcctcggcggcatcggctccctgcctggggcgatgctgggcgggatcatcctcggtatctccgagtcgctgttctcggggttgatcaactctgactacaaagacgtgttcagtttctccctgctggtggtgattctgattttccgtccccagggcctgcttggtcgcccacttgtggcgaaggtgtaaacatgtctgctgccaaatccattgatatcaagaaaagtgtcgtcgatacggtgctcgcggggctgatttcgctgatcgtgttcggcccgattgtcggcgtggtgctcgacggctacagcttcaacctggaacctgcgcgggttgccgtgctggtcgccatcgtcatggccgggcgctttgccttgagcctgttcctgcaaacccccaagggcgtgaagatcctgcaagggttcgagagcagtggctccggcgtgcacgtgctgccgccggactacaagtcgcggctgcgctggatcatcccggcgctgatcgtgatcgccatcgtgttcccgatctttgccaacaagtacctgctcaccgtggtaatcctggggctgatctacgtgttgctcggcctggggctgaacatcgtggtgggcctggcgggcctactcgacctgggttacgtggcgttctatgccatcggtgcctacggcctggcgctgggttatcaatacctgggcctgggcttctggaccgtgctgccactggcggccatcgcggcggcgctggcggggtgcatactcggcttcccggtgctgcgaatgcacggtgactacttggccatcgtgaccctgggttttggtgaaattattcgcctggtgctcaacaactggctgtcgttcaccggtggcccgaacggtatgcccgtgccgtcaccgaccttcctgggcctggagttcggcaagcgtgcgaaggatggcggcattccgtttcacgagtttttcggcatcgattacaaccccaacatcaagttcatgttcatctacatcgtgctgtttctggtggtgctggccgtgctgtacatcaagcatcgcctcacgcgtatgccggtcggtcgcgcttgggaagccttgcgtgaagatgaaatcgcctgtcgttccatgggcctgaaccatgtgctggtcaaactctcagccttcaccatcggcgcgtccaccgccggtttggccggggtgttttttgccagctaccagggcttcgtcaacccgtcgtcgtttaccttcttcgagtcggcgttgatcctcgccatcgtggtgttgggcggcatgggctcgacggtcggcgtggtgatcgccgcgtttgtgctgaccgtggcgcctgaattactgcgcagcttctctgaataccgtgtgctgctgtttggcgtgttgatggtggtgatgatgatctggaggccgcgtggcttgattcgcatcagccgtaccggtgtgacgccacgcaagggggtagcgccatgagcaaagaagtcgtcctctccgtggagcacctgatgatgcactttgggggcatcaaggccctcagtgatgtgagcctgcaggtcaaacgcaactcgatcttcgccctgatcggccccaacggcgccggcaagaccacggtgttcaactgcctcactggcttctacaaagccagcggcggcaagatcgagctcaacgtgcggggcaagcaaaccaacgtcattcagttgctgggggagcgctttgaggccactgactttgtctcgccgaaaagcttcctcagtcgcgtgtactacaagatgttcggcggcacccacctggtgaaccgcgccggccttgcgcgcaccttccagaacattcgcctgttcaaggaaatgtcggtgctggaaaacctgctggtggcccaacacatgtgggtcaaccgcaacatgctcgccggcatcctcaataccaagggctaccgcaaggccgaaagcgatgcgctggattgcgcgttctactggctggaagtggtcgacctggtggactgcgccaaccgcctggccggcgagctctcctacggccagcagcgccgcctggagatcgcccgcgccatgtgcacgcggccgcagatcatctgcctggacgaaccggcagcgggcctcaaccctcaggaaaccgaagccctcagcgcgatgattcgcctgctgcgcgacgaacacgacctgacggtggtgctgatcgaacacgacatgggcatggtgatgagtatttccgaccacattgtggtgctggaccacggcaacgtgatcgccgaaggcggcccggatgcgatccgcaacgaccccaaagtgatcgccgcctacctgggcgcggatgaagaggaactggtatgagtgcacctatcctcgaaatgaaggacctggacgtgttctacggcccgatccaggctctgaaaaaagtctcgctgcacatcaacgaaggcgaaaccgtcagcctgatcggctccaatggcgcgggtaaatcaacgttgctgatgtcgatcttcggtcagcctcgggccgagtctgggcagatcctctacaacggcgtcgacattactcacaagtcgtcccactacatcgcctccaacggcattgcgcagtcgccggaagggcggcgggttttccccgacatgaccgtcgaggaaaacctgctgatgggcaccatccctattggcgacaagttcgccagtgaagacatgcagcgcatgttcgagctgttccccaggctcaaggagcggcgcaaccagcgggcgatgaccatgtccggtggtgagcagcaaatgctcgccatcgcccgtgcgctgatgagccggcccaagctgttgttgctcgatgagccaagcctggggttggcaccgattgtggtgaagcagatcttctccaccctgcgcgagctggcgtccaccggtatgaccatcttcctggtggagcagaacgccaaccatgcgctgcgcctgtcggaccgcgcgtatgtgatggtcaatggtgagattcgcctgaccggcacaggcaaggagttgctggtgaacgaggacgtgcgtaacgcctacctgggcggtcactaacctaagatccaggcgcatcaaccctgtgggaaccgggccttatgtgggagccgggcttgcccgcgatagcatcacctcggtttagctgacataccgaggtggccgcatcgcaggcaagccagctcccacccaaagccggttcccacatttgtttttgcgatgtccacaagcgcccaaccaaattgtggaaaacaaatccagcccacctcaaaagcgcgacatatagccgccgcaaatccctgttttgtcacagttttgacttgtccccatccactgtggaaccggctgtgggtaacgtgggagtagctggctggaagcctttaacgacgtggcttgcagcgtgctggttgttttttgatcagcgtgtttttcaccagcgcaccaggggtttgtcaacctgtttaaagacacaggtatatgaactaaataagtcattgcagcctgtggataagtctgtgactaaactctggaaagacgcgcgcaggggccggaatgactggcctggagccatcgttgtgtttttctgcatttgtcggcggctacataggtgctcgctcaggtcaagcaaaaaactttctaaaaccgcctgcaacccttgtgcacagcggctttgagccttttgcacttgcccccaaagactgtgggcgcagttgtggataacctgcgcgcatatggctacaagccacggtttataaggctttgatcggattgatcaaaaaatgatcagccaagcatgcgtgtgtatgcacagcggttgccgcaaaggcggcgtacgggcattctgctggctgtttttttcccgatgcccgtaaggagaacaccatgtccgacacgctgtttatcactggcgccacttcaggtttcggcgaagcctgtgcccgtcgttttgccgaggccggctggaaactggtgctcaccggtcgtcgtgccgagcgcttgaatgccttggtcgaagagctttccaagcagaccgaagtgcatggcctggtggtggatgtgcgcgaccgcaaaggcatggaggaggccatcgccaacttgccgccgtcgttcgccacgctgcgtggcctgatcaacaacgcaggtctcgccgtgggcactgaccctgcacccaagtgcgacctcgacgactgggaaaccatggtcgataccaacatcaagggcctgctgaccaccaccaacctgctgttgccgcggctgattgcccatggccgaggcgccgggattatcaacctgggctccatcgctggtaactacccgtacccgggcagccatgtgtatggcggttccaaggcgttcgtgaagcagttctcgctgaacctgcgctgcgacctgcaaggcacgggcgtacgggtgaccaacatcgagccgggcctgtgtgagagcgagttctccctggtgcgctttggcggtgaccaggcgcgttatgacgccacctatgccggggccgagccgatccagccgcaggatattgccgatacgattttctgggtgatgaacaccccggcgcacgtgaacatcaaccgcctggagctgatgccagtgagccagacctgggctggttttgcgattgagcgtggggccaagggctaagccgatcgcttgatcgttcccacgctccgcgtgggaatgccgctgggggcgctctgcgccccgctttctgctggtgacgcagagcgtcacgcgatgcattcccacgcggagcgtgggaacgatcagtggcgtcaaatcggccaaaatgcggcataaggtacactgcccgcctgaaaaccccaccgcacccagcggtttaaaggttttgacaggaggcaatgtgagtaaccgaggtgagcaggcactgctcaaacaatcgaccatcctgatgttcgcagtcgcgatcgccgggattgtcacgggtgtaatatccggcgcccaatccattctgttcgacggctttttctcgctgatcgccaccgccatcaaggtgttgatgctgatcacggccaagctgatcgccaaaaaaagcaacgatcgcttccagttcggctattggcacctggagccgatggtgctgctgatagaaggcagtttcctgctgttgatcgccatctacgcgttcctcaatggcgtgttcggcattatcaatggcgggcgcgaaatcgagttggggctggtgatcatttatgcggcggtgtttaccgtcgtggagttcgcgtacttcttctatgtgcgctaccgcaatcgcacactcaagtcgtcattgatccagttcgacaacatcagctggctggtggacgcgatgctgtcggtgggtttgctgatcagcttcctggccgcgctgttgctaaagtcccagggctatggcgagtgggcggtctacgtcgacccgttgatcctgatcctgctggccctgagcatgctggcgccggcattcaagattttgcgcccagcgttgcgcgaagtattgggcatcgcgccggatcatttggacgacaaggtccgcgaagtgatggacgcggcgcaggccaagcatggtttcgacgactacgtgtcctatgtgcagaagcacgggcgcgcgcggtttatcgagattcatgtggtgctgccggcggattacccggtggataacgtcgccacccttgatgggctgcgtgaagagatatccacagggctgggggcggcggatgcggcgcggtggttgacgatcagttttacaggcgaccgcaagtggattgcctaaagtctgttagaccgaggtgaggctatcgcaggcaagccagctcccacagttgatagtgttcgcacattaaaatgtgggagctggcttgcctgcgatggggccttgcaggtcagcccagatgctggaccaagccctgatagcaagtcgccaaatgataaggcgtagtcgaaggcatatcccgccggctcaccttaccctcggcatccaggcattcatgccaaccctttgcatgcaaaaagcgctgttgcaacgcctgcaactgacgcaacagcaccgcttcgctgcctggccgcaaggtcagtgcccgcaggtactcggcctgcgcccagatccgttgggtaccgtcgcgcaccgtgccatccagcgcgagcatgccgctgaccgcaccgcttaacttatccacacccttgtgctcggcataggcaaatgcccgtgtcagcgagccatgcagcgcggtgccgcgcagcacagctgaagattcgagcaaaaagaaccattcgaactggtgccccggctcaaaccagttatccacagcgcccaaaggtttttccatcatcacgccgtgctcgcggtcgatgaagcgttgctgcatggccgtcgccagtgccagcagggccgcttgtacctgggcgtcctcacgtaccgcgagggtggccaggaaaccttcggccaggtgcatcaacgggttttgcaaggggcctgcgttgagtgaggcccagttgcgctccagtactgcctcgtacaacccgtcgccggtggcaaagcgttgagcgacgacttccagggcggcgttgagcaccgactctaccagcggctcacgcaccttggcccagtaatgggcgcaggcaaaaataatgaaggcgtgggtgtagaggtctttgcgctcgtccagcggttggccggcagggtcgatgctgtagaaccagccaccgtgttcggcatcatggaagtgccgttgcagggagcgaaacagcgccgctgcacgttcttcggcgaacgccgcgccgggctcgccgatcaggctcgcgaacaggtacaactgccgggcgcaggccatggcgcgatagcgctgggggggcagtggctggtgatcggcgtccagggcctcaaagggcaatgccaggtcggcattccagcccgggccttgccagagcggcacgatcaggtcatggaagtgcgtgagcacaggcgtcagggaagagggggaagcgatgggcattggctggcgtcgtcacggcaggggtgtaggcgcgcatggtagcaggctgatcgttcccacgctctgcgtgggaatgcattttatgacgctctgcgtcatgctttgggacgcagagcgtcctaggctgcattcccacgcggagcgtgggaacgatcttttcctcagcccgccagcaaccaaaccccagtcgccgccgaagccgccccggccactcgcaccagtggcgctgcagccgccggcaaaaagcgcaccaccgcataacccgcagcgtgcaacacggcggtcgcccctacaaacccagccgcatacgcccaagggctggtcatatccggcagttccaggccatgggccacgccgtgaaacagtgcaaacaaggccgtggcgcctaccgccacgaacagcggtggccgcaccgccaatgctaccgccaggcccagggccagcaccgatgcagcaatcccgctttccagcgcgggcagttgcagcccttcaaaacccagcacgccgccgatcagcatggtgccgacaaaggtgcacggcagcgcccagcgcgcggcgcctttttgctgggcagcccaaaggcccaccgcaagcatggccagcaagtgatcgagaccgcccaagggatggctgataccggccaccaggccattgtcgccgtggcctggatgcgcgaaggccagggcaggggcgagtagcagcgcggcagcggcgaagagtttgttgaagctcatggacaggttccttatgggttgatcaggcggcggtcagcaggccctggcgttcgatgaaggcgacgatgtcgtccaggccgaccccggttttctggttgctgaacacaaagggtttgccgttgcgcatgcgctgggtgtcgctgttcatcagttccagcgaggcgccgaccagcggggccaggtcgatcttgttgatcaccagcaggtcggatttgcaaataccgggcccgcccttgcgcggcagcttgtcgcccgcagacacatcgatcacatagatggtcaggtccgacagttccgggctgaaggtggcggacaggttgtcgccgccggactccaccagaatcaggtccaggccgggaaaacggcggttgagttggtccacggcctccaagttgatcgaggcatcttcgcgaatcgccgtgtgcgggcagccaccggtttccacgccgatgatgcgctccggcgccagggcctggttgcgcaccaggaagtcggcgtcttcgcgggtgtagatgtcgttggtgaccaccgccaggttatagcgatcgcgcagcgccaggcacagggccagggtcagggcggtcttgcccgagcctaccgggccgccgataccgacgcgcaggggttgtgtgttcatgggcttctccacaatcaggaacggaacaggcggctgtactggcgctcatgggccatgcacgccagggacaggccaaaagcggcgctgcccaaatggttagggttaatgcgttcggcatcctgctgggcttgttgcagcagcggcagcagttcgctggtcaggcgctgggcggcttgctggcccagtggcagggttttcatcagcaccgccaattggttttccagccagctccatagccaggcggcaagggcatcgccagggctgatgtgccaggcgcgcgcggccaaggcccagccaagggccaggtgcggttcgtcgcgttgagcgagaaagtcacgggcgctgtcgtccagttccggcaagccgttgagcagttgttgcaaggagtagcccatctggcggctctcctgatacagctcgcgggtctcacggctggcgcggtgctcgtcgcacaactgcgccagttgggcccagtcctgctcagcggcggcgcggcaatgggcgagcaacagcggcgcttcgaaacgcgccaggttgagcagcaactggtcactgatccagcgtcgggcgctcgcggcatcctgtacgcggccgttgtccaccgccatttccaggccctgggaatagctgtagccgccaatcggcaattgcggactggccaggcgtagcagcgcccaggctgggttcatagacgcacgccgaactgatgcagcttgggcgcgtagttgaagtcttcatcgccatggcgtgagtgatgatggccaccgccataggcgccgtgctcgggttgaaacggcgcttctatggtctgcgcatcggcgcctaactgttcaagcatggccttgagcacgtagtcatcgagcaggcgcagccagccgtcaccgacttgcagggccacatggcggttgcccaggtgataagcggcgcgggtcagctcaaaggcattgcggcaggtgacgtgcagcagttgttcaggtcgggcacacacccgtacgacgcgtccgtcttctgcctgtaggaattcgccatcgtgcaagggcggctggccccgctccaaaaacaggccgacgtcttcaccgtcggcactgaaacagcgcagacggcttttgctgcgggcttcgaagttgagcagcaactcggcggcccagagggcttggggggcgattcggcggtgtatcaccagcatcagagagcttccagctgtgagcgatgaaagacctagagcaaggggcttgccaatcatggaattgagtaggaattccctgtagtcaggcaggcatgctgctcaatagggcgtcggataattcggtgcgtgtatcaatttggtgcgtgtcgatgtttatagcaccggcgaagggcgttttgcgttgatggtggcgctcagcttgatgaaatttctttcatctttttctcagtaggcggtttttaggatttgtcctacgaatcatgaggatttggagttcatgagattacttgagggttctttaggctatgcgccctgtttaatgccaccgcgacgtttatcatgcttcgatcaattttctgtatatgcctggtcagcctgaccttctttatttcatcggcatcggccaactttcagccccgcgccaccttcggttcgtcgctgcaaagcctcaagccggcctccatcgacgacgtgatcgaccgcgcccatgagttgctgggcacgccctacaagtggggcggcacttctgcagagcagggctttgattgcagcagcttcctggtgtacctgttcaagacccaggccaatatccagataccgcgcaccaccacggccatgcaccgctcatcggcggcgaccatcaagcgcaatgcgttgaagcctggggatgcggtgtttttcaaaggcaacgggcgcggccaggtcagccatgtcggcctttatatcggccaaggcaaattcatccattcgccgcgcaccggcaaaaccattcgtatcgattcattgagcaatagctactggaacaagcactacaccactgccaaacgattccacacggcgggttgattgctttattcggtgctgcccagcccttgccaatgcttgaggccgataaagataaagcgcagttgttgggtgatcttcgcctggggcgtgaggtgggccggcaaggcgtgggccggtgggtcgatgatatcgggcagggtggcgaacacgctcttgacgatcaggtcggccatcacatgcaaaccttccgcatccaggtgctgcaacttgggcatcaacgtcaggtcggcggccaaatcgcgggtgatgtcttcgcgcagggcggcaatggcttggcgcacggccagacagccgccgtactgttcgcgggccagaaacaaaaattgcgaacggttggccgagaccacatcgagaaagatgcgcaccgaggcatcgatgatgccgcccatcacgaattcgttgtggcgcaccaggcggatcgtggcgcgaaaggtctggccgacctcgctgaccaataccagcccaagttggtccatgtcggcgaaatggcgatagaaaccggtgggtacgatacccgcggtcttggccacttcgcgcaggctcaggctgccaaacccacggccacactccatcagatggcgggctgcgtccatcagggcgaggcgggtctgttgcttctgttcggcgcggggcagcatgagcggatgagctttgtcggcaagtacagcgacgcactctagcaaaagcgctttgccggcgtcgaacttggcaggggcggggcgtgacgcggtctatataaaagcaaaagcccgatcggcagatcgggcttttttctgggccaccacaggcttagctctgtgcttgatgcagttcttgcagacggtcggcaccgccttcagcaacgccttcggtgtaggcgcgtttgttggcttgttcggcaccgccttcgaccaaacctttctcttgcagacggttgtagccattttcagctacggcgcctttggcgtagtcacggttttcgtcttcttgcgaaccgctgcgagccacggtttggctggtttgcacggcttgagctttgttctgtggggtggcctgttcggcggctggcagggcaaaagcgctggaagccaggacagataacagaacggtagcgagtaattggcgtttcatgatggttgctcctagggagggcgataaagtgggtacagggctaatgttacccttgataagtcgatataaaagttcataaacacaatggtaataatcaacagaattgattgttctcgccggaggctctagatcgagcctctcaagcccgcgggtttgcaccgatgtgggtattttcgacacgagcctgggtaacaatggtgcgtcgccgatggggaaaatggtctggttgatcaagaaaatcgcttttttcggctaaatccgccgttgcgttaaaccccccggcactttgccagtcgtagtcctataagctgtttaaaaggctgttgcccagccagtcgtattcaggagtcctgtgcaatgacgcgcactcgtaaaatcgtcgcttggagctgcgccagcttcgttctgttaatggccatcgtggtactggtgttggtgttcttcgactggaaccgcatcaagccgcccctcaatgccaaggtttccgaagagctgcatcgtccgttcgccattaacggcaacctcgcggtggtgtggcagcgtgagcccgatgaaggtggctggcgcgcctgggtgccgtggccccatgtgattgccgaagacctgaccctgggtaaccctgattggtcgaaacaaccgcagatggtcacgctcaagaaggttgagctgcgcatttcgcccctggccttgctggtgcagcgtgtggtgatcccgcgcatcgacctcaccgaaccgagtgcccagttgcagcgcctggcggatggccgtgctaactggaccttcaagttcgaccccaaggaccccgacgccgaaccgtccaactgggtggtggacattggcgccatcggcttcgacaaaggccatgtgaccctcgacgatcaaagcctcaagacccagctggatgtgatcatcgacccactgggcaagccgatccccttcggcgaaatcgtcggcgacgccgatgccaagaaggccctggaaaagggctcggcgccccaggactacgcgttcggcctcaaggtcaaaggccagtaccacgggcagaagctggcgggtacgggcaagatcggtggtttgctggccttgcaggacgcggccaagccgttcccgctgcaagcccaggtcaagatcgcggacaccagcatcgctctggccggcactctgaccgacccgctgaacctcggcgccctggacctgcgcctgaaactgtcgggcagtagcctgggcaacctgtacccgctgaccggcgtgaccctgccggactcgccggcctattccaccgacggccatctgatcgccaaactgcatgaagccagcggcgcctccttccgctacgagaacttcaacggcaagatcggcaacagcgacatccacggcgacctggcctatgtcgccagccagccacggcccaagctcagcggcgcgctggtgtccaaccagttgctgatggatgacttggcgcctttgatcggcgcggactccaacgccaagcaaaaagcccgtggcggtgaaagcaaacagccggcgaccaaagtgctgccggttgaagagttccgcaccgagcgttggcacgatatggatgctgacgtcgagttcactggcaaacgcatcgtccacagtgccgacttgcctttcaccgacctctacacgcacttggtgctcaacgacggccaactgagcctcgaacccctgcgtttcggcgtggccggtggcaagctcgatgcgcagattcgcttgaacggccgcaccaccccgatggagggccgcgccaaactcacggcgcgtaacttcaagctcaagcagttgttccccaccttcgagccgatgaaaaccagctttggtgaactcaacggcgatgccgatattgccgggcgcggtaactcggtggcggcactgttgggcacgtccaacggtgacctgaagatgctcatcaacgatggcgccatcagccgaagcctgatggaaatcgccgggctcaacgtgggcaactacgtggtgggccgtctgttcggcgacgaggaagtgaagatcaactgcgcggcggcggacttcggcatcaagacgggcctggcgaccacgcggttgtttgtgttcgataccgagaacgcgatcatctacatcgatggcaccgcgaatatggccactgagcagttggacctgaccattacgccggaatccaagggctttcgcctgttctccctgcgttcaccgctgtatgtcaacgggccgtttatcaagcccaatgccggcgtgaaggccatcccgctagccctgcgcggtgccggtatggtcgctttgggtgtgattgccgggccggccgcgggcttgctcgccttggtggccccaagcggtggcgagcccaatgagtgcgcaccgttgctgcaacagatgaaggaaggcaaggcgcccaagaccgtgaagtaactgtgcgggcttgcccgcgatagcggagtatcagtcaatgatttatcaactgatcccacgctatcgcgggcaagcccgctcccacagggggtatgttgcggtgttagttattacagatcttgcagaatatccgccatatcgtcggcgtgttcttcttcctgggccaggatgtcttcgaagatgcgacgggtcgtcgggtctttgtcaccgatgtactggatgatctcgcggtagctgtctaccgcgatccgctcggccaccaggtcttcgtagaccatttccttcaaggtgttgcccgccacgtattgcgcatgggagttcttcgacagcaggtcggggttgaattccggctcgccgcccagctgcacgatgcgctcggccagtttgtcggcgtgctcggcttcctgggtcgcatgttccaggaactcatcggcagccacgctggccttgaggccgttggccatgaagtagtgacgcttgtagcgcagcacgcagaccagttcggtggccagcgactcgttgagcaggcggatgatttcttcccggtcggcgtcgtagccttcggtcacggcgccgttttcgacgttctggcgggcgcggctgcgcagggttgcaacgtcagtcaatcgtgcttcagtcatttcaatctcctggggctaatccggttgtacgccacgctctgccggcgtgatcgctattggttgtgagtcccgggccaggcgaaaagttttatcggatttaacaggatgtgtcctgagggcgtctgaccggtgtggtccagcgctccgacagaattacgccacccagggtcagcaagccacccaccaggtgatacagcgccagctcttccttgagcaccagcgcggcaatcagcgcggtaatcaagggcagcaggttgaaaaacagcgtggtacggcttggccccagggtcttgaccgagtgcatccacgccaacggcgccaacatcgacgccagcaggcaggcgtacagcaccagcggaatattcgcccagcccaaaccggccttggccgagaacagatacagcggcagcagcaccaccaccgcgaccagcacctgcaaatacagcagcaccaacggcggcaggcgcagttgccattttttcagcagggtgctgtagaccgcataagccaacgttgccaccagcatcatgccgtcgcccaggttgaccccatgttgcagcaacgcgcccaagctgccggccgacaccaccactaccacgcctgcgaacgacaacatcgcgccggtcaacgcaccgaaggtcaggcgttggccaaggctgatgatcgcagcggtcagcgccatcaacggcatcagcgacaggatgatgcccatattggtggcgctggtcagcgtcgcggcgtaataggccaggctttgatacaccgccatgcccagcacgccgaggataaagatcttgcccaggttgggacggatctgcggccagtgggcgaccaccggtttgagcatgaacggcgtgaacagcaacgcagcgaacaaccagcggtaaaagccgatttcagccgggaagatcgagcccacggccaatttgttgaccacggtgttgccggcccagataaagatagccagcagcggataagcgtattgcattgaaaagaaacccagtgtgttgacgaggcaggattatcctctgtctggatcgaggcctatactgcgatccagacaactgagcgttgaatccagacaacatgtcccgacacaccgtacgcctgcccgatttcgcccgcctgccaagccctgtgtactttcggtattccgattttgccccggacaccgaatgcaccccgcaccagcacacctggggctcgctggattactcggccagcggtgtgatgcgcatggaagtggcgggtaatcgcttcatgtcgccaccgcaatacgccgtgtgggtgccgccgcttaccgagcacagctcctacaatgccgaggcgattgtctaccactctgtgggcctggcgccgcagctgtgcgagcagttgccgcagcagccttgcacgttggcgatcagcgatattctcaaggccatcctcaaggatttcgccctgcgcgatgtcaatgcaccgcgcaccgatgctgacatccgcctggcccaagtgctggtggaccagctccggcaggcgccggtccacgactgcttcctgccctacgcccgccaccctgggttgcttggggtcttggagggcatgcaggccgagccgggagacaaccgcccgctggcgcaatgggccgagcaggtgcatgtgagcgagcgcaccctggcgcgccagtttgtgcgcgagctgggcatgagcttcggcgaatggcgccagcgcttgcgctacctggcggccatcgaagcgctggacagcgaccgcagcgtgcaacacgtggcgtttgatctgggctacagcaccgcctcagcgtttatcgccatgttccaacgccacgccggctgcacgccggagcaataccggcgggcgaatattcgtggccggtgaagttgtaacaggttttgactacactgcgctgtaggccgtgcccgtcggcacggtaacagggagaaaactccatgaagatgctgcgtattccgttgttgatgatgggcctgctgatgtgtgcccagggttttgccgccactgcccagcaaaacaaaatgaccacctgcaatgccgaggccaccaccaagacgctcaagggcgatgaccgtaaggccttcatgaagacctgcctgtcggcacctgccgccaacgacgccaagaccctgaccccgcagcagcagaagatgaaagactgcaatgcgtcggcgaaaacccaagccttggccggtgatgcgcgcaaaaccttcatgagcacttgcctgaagaaataatagccccgggccatagaaggctgcgacactcgcacacagcccctttgtaggagcgagcttgctcgcgaaaaacgtgaacgatcacacgggcgccctgactaaacgaggcgccctttcgtttttcgcgagcaagctcgctcctacaacatccttcaacgccgtttgttttgaggctgtatgccaacgttttctcagcgtcatgtgttgttgctgtccagctacatcatcattttcggcgggttgctgctggtactgccgctgaaattgctgcccagcctgctggccggcctgttggtctatgagctggtcaacatgctcacccctcaactgcaacgcctgatcgaaggccggcgcgcgcgctggctggcggtggccttgctgggcaccctgatcgtcagcgtgctggccttgattttcgccggcgccatcagcttcctgctccacgaagcggaaaaccccggggcgtccctggataaattcatgggggtggtcgaccgcgcgcgcgggcaattgccgccgtccatcgacgcttacctgcccgccagcgccgcggagtttcgcgtggctattggcgattggctaagcaaacacctgagcgagctgcaactggtcggcaaagacgccgcccacatgttcgtcaccttgctgatcggcatggtgctgggcgcgatcatcgccctgcagcgcgtgcccgacctgacgaagcgcaagcccctggccgccgcgctgttcgaccgcctgcacctgctggtccaggcgtttcgcaatatcgtctttgcccagatcaagatcgccgcgctgaacacggccttcaccgcggtgttcctggcggtggtgcttccgctgtgtggcatccacctgccgttgaccaagactctgatcgtgctgaccttcctgcttggcctgctgccggtgatcggcaacctgatctccaacacgttgatcaccatcgtggcgctgtcgctgtcgatctgggtggcggtggcggcgctggggtatttgatcgtgatccacaaggtcgagtacttcctcaacgcgcgtatcgttggcgggcagatcagtgccaagtcgtgggagttgctgttggcgatgctggtgtttgaggcggcgttcggcttgccgggggtggtggcggggccgatttactatgcttatctgaagagcgagctgaagctgggtgggatggtttaaaccttgtgtcgcctgggctgacgccatcgcgggcaagcccgctcccacattgaaatgcgatcaactgtgggagctggcttgcctgcgatgacggcctcacagccggcccctatctatctgacgccccgcgatcaaactgtgggagcgggcttgctcgcgaaggcggcctgacagtcaacgcagttcgattgtgtatatatccattgctgcggtaacggccacttagggttccgccctgacggcgggtcactttggaaaagccggaatgccggcccagcccaaagtaaccaaagggctcttgccccaccactcggcacctcgcttaggctcggtgtgcccgtaatccgccggcatccctgccggtttaccccccaaatccctgtcgaattccggccagcgtggtttgacggggcgcttgagatcaaaagcagatcaagatcaagagcggctcgcttcgcatcgtggttactgtcggaggggggggcgccacggtgtcagctacaactcagcaaccgtaacgcttgctcgcctcaatcgccaaaccactgccaatactgccgaagatattgccttccacatgccgcgcattcggcagcattgccgagatgctgtggcgcagtgccgggatgccgctggagccgccggtgaagaacaccgtgtccacttgcgccacgctcaccgaggcgtcgttgagcaactgcgtgacgctgccgcgtacgcgttccagcagattgtcgatggacgactcgaacagcgcgcggctcaggtctacgctcaggccggcttcgatgcggtccagcggcacgtggcggctgtctgcctgggtgagctggatcttggtctcttccacttccatggccagccagtgcccggcgcgctgttcgatcagcttgaacaggcggtcgatgccgccggtgtcttcgatgtcgtagcgcatgctgcccagggccagctgggatttttgtgagtacaccgagttgatggtatgccaggtggccaggttcatgtggtggctggtaggcatgtaggcgccgcttttcatgcggctgccgtagccgaacagcggcatcatgccggctagcgagagctgtttgtcgaagtcggtaccgccgatgtgcacgccgccggtggcgaggatgtcgctctggcggttgtcgttgtgacgacgctccggcgacaggcgcaccagggagaagtcggaggtaccaccgccgatgtcgacgatcagcaccagctcttctttggtgatggtggactcgtagtcgaaggcagcagcaattggttcgtactggaaggagatgtccttgaagccgatcttgcgcgccacgtccaccagggtgttttccgcttcctggtcggccatcgggtcgtcatcgacgaagaacaccgggcggcccagcaccacttcttcgaactcacggccggcgttggcttcggcgcggctcttgagttggccgataaacagggccagcaggtcggtgaagggcatggcggtgccgagcacgctggtgtcgtgcttgatcagcttggaacccagcaggctcttgagcgagcgcatcaggcggccttcgtagttctccaagtattcgtgcagcgccaggcgaccgtacaccgggcggcgctcctcgaagttgaaaaagaccactgacggcaatgtgatcttgtcgtcctccagcgcgatcagcgtctcctcgccggggcggatccagccgacggtggagttggacgtgccgaagtcgatgccgcaggcacgggctggggatgcgtttttcatgtctcacaggttccgggcaaaaaacggccgcgcagtgtatgccactggcgcgcggatgcgtagaccggtgatccgtaaatccaccggcattcgtgttacatagctacgtcttgagcctgccggggtttggctaggctgcggttttaccgctcacggatgaaccgctatgcctgatgcaaccttcaccgccgacctgcgcggcgtgcactacgacttcctcaaacaacgcgtgccaagctggttcctggagggcacgacccagcgccaggaagagctgggccagcacgagatggacattccttcctggtacctggccgcgactcaccaggacaaaaccgccctggccgcgcagcacacacgttttcgcgaaaccctcaattcaatcgaagcgcatctcggccagatcgacgacatcctcgcgttcgccgagcagccgctcaaggacgcactcaaaaagcagttcaacctggagctggatgtacgcaatgtgttcttcgtgcgcaaatatgcctacaaaggtgctcgcgatgatttttatggcgccttcgtgtttgaccagcaaaacgatccctccctgacccacacctaccgaggtgtctccctgctggaagcggccctggccaatttcgaggccgatgaagaacagccatcgccgtgcaacgattgccaactcattacccgctggaaccccgacaacccccatatcatcgcgacattcgcggccgtcagcgcccacgccgtggcgatcaagccccatgagtttgccaagctgtgccgctccctggacctcggcgcccagtatcacaagcacatcaaggaggtggtcgaacccgacgccgcccaggagcgcgaggcgctggagcaagtgcttgaggagcatcaacgccagcaactggcgctgagcatcgagattgcccggttgcagttaaacggcgcgttgagtgccgatgcctatcagatgctcaaacaggtggtagccggttccggcacgccgaagcttgcgggtaagccggttacctatgccgccctcaaggtactggacagcgtgctggtggggccgctgctgatcgggccagaccgtgcacattcggaccgtaccgagcgcctggtggtgtacatacccggcgacccgcaacagccggtcaaggagtacgcctccagtggcgagttcatggtcgacctgcgcatgcgcttgcacagcgcgtcgtatcgacgctttttcagccgctttgtaccggtgcgcgagcaaggcggatttttcgctcgtttcaaccggttgtaccagcccgccgacaatgacaacggcgggacggattatccgctgcgtaaggcgttggtgcatttgcccatggacgagttcctcctcagcggtgatctctggcagcgcagtcgccaggcgcatatccgcaagatcttgagtgatgcgcgggccgtggccgtacccaccgaggacgaggaccgcaaggcgcggctggagcgcctggaaagttttttcgatgccgctgtcagcgtgttcaacctggcggccttcgtggtgccagggctggggcctatcatgctggccgtgggcgcgtcgcagatgtgctacgaggtgtttgaagggatagaagcctatgggcaaggcgagccacggcaaatgtgggcgcattttgcgtcggtggcgttgaacgtggcgtttattgccaccggcgccaaggtgttgcccgccatcaaatggcaaagcgcggtggaccacctcaagcctgtgacgatgccgtccggcaagcaggtgctgtggaaccctgacctcgcgccctacgcgtcgccggtcaaaccggcgcccgaggccaaggccaacgcgctgggcctgtataaccacgacggtcaacagttgctggcattcgaggatgcgcattatcaggtcaggcaagaccctcacaccggcgattaccgcattcagcacccgacgcggctcgacgcttatgcaccggagctggagcacaaccacaacggcgtttggacccacgagctggaagaaccgctgacttgggacgaatcaaccctgctcaaacgcttggggcttgccgagcaggccgacccgctgcgtatcagcggcgtcgacaccgacgtgttgcgccaggccgcggtccatcacgagccactgccgttgctgctggaagacacgctcaagcgcttccaattgcaccaacagctcaccacctttgtcgagcagataaaaagcagcgacccattggtgtactcgaaagccgaaccggcgctgcaatttgacctgcttcagcgccgtggcctgctgcccgacaacgtggcgctgaaagttatcggccctcagggcgaggtgctctgggaggcagctgatgcaccggcgtcggccagcaagcgcgtcatggtggtgaccgaaagcgccatggcccagggccgtttgctccgggagttgctgtacaccttgcagggtgtcgacccgctgctcaaagagtttccaggtagccccgaggaatcgctggaggtgcgcgcgggcaagctgcgccattatctcggcgatgccgttgacaccctcaaggggccgttgctggaacaacgctaccaagtgctgaaccctacgaccgatgccgatgtacaacgtttgctggatacctatcctgccttgcccacagcggtcgccgagcgtgtgttgcaaggggcgacgacagatcaactgcaggcctttcgcaacacgcgccgcttgcccgagcccctggccacgcaagcccgatggtgtgcccaggaaacccgggtggcccgtgcctatgaagggttgcacctggacaccctgacgcacctcgacagccagcgcctggccttgcgcaccctggaaaccctgccgggctggcaccgcggctcgcgcatcgagctgcgtcagtattcggctgaaggcacggtgctggatgccatcggctcccctgactttccgcataaacgcacgctggtattgctggaacgcggcgacttccaagcctccatgcccggcgatttttacagcgctatatgggaacaattgccgctcgatgaacgccagcgcctgggtctgagcagtgccgctgaactgaagcagacgattcaacgcagcccgttaccgcgtgaaccgttgcgcacggtgctggaggagaacccgttgcgtaagcctgactatgacccgatggccaggctgttgggcggcgcgcctggggtgcgacagttgttaaggacggcagggagtgtgcttcgctccccggcggagcgggtacggcggttgtttccaaccttcagcgacgaacaggtcacagcgttcattgagtcgctgggcacagacgtgcggggcgagttggccagccgtgagttggagtaccgcaccctgaaaaaaaccttgaaggtctgggcacaagcaaaggggccgcgggccttggccccttacagcgaggagtggcgtgtgagcgaagagatcaaacgctgctggcgccgtgagaccgggaaccaactgcacattcgcctgccgagggacagtctctattgggtggatttgcccggcataaaagggggcttcgaccatgtccgggagttggtgttgtcgaatgtcaaatggggtgggcattccagtgcgttgttcctcgaaaactttaccgagttgaacagcctgagcatcacgggggccgaaatgaccgagctgcctgcggtgattggcgacatgaaacagctcacgtcgctgaagctgcacgccaacggcctgcagttgaccgaacgcagcgcgggactgttaagcgatctcaatgcgctgcaagtgctcgacctgtcgagtaacccattgggggtgacgccagacttcagtggcatgccccatttaagagagctgaatctattctggacgcgaatcgagcggtggccgtcggggttgagagagcaggccgggctggagcgcctcgacctgcgccagaaccgtctgcaacaggtaccgcaggacaacctggtgccgcccgcggatcaattggaagccgtggcacggatcaacaatgtcaccttgcttgaggataatcgcttcccgcccgattactggaaaaccttcgataagtactggcaggacctggcccagtctcgacccgacctgttgcaaggggcgcttgagggcgctttcgacagtaaaaatccgcgcatcgagaaggtggtgtacatgtaccctgagtactccgtgcagaaggccagggcgcttatctggtcctggggtgaaggggctgaggcgcagctgaaccgcctctggcaagagcactctgtgctgctccggcagttgaacggatggctgttttcaggcggtggtgagcgccagcgctatgtgcgtgtcggcgagcgtgccaatgacgcagggtctttgcgtgaccgccaccatgcctgggagcgtatcttgcgctgctggaggcaagacacaccgcaacagctcaccaatgatggcgaacctttcgggcttgagttgaacctcagtgatctgaacctgccgagcctgcctgacctggatgcggatttcagccatgtgggttcgctcaaactgagcaatatgaacctgcgaacctcgccggaagggttcctcgcgcgttttcgcggcgtgcgctggctcgacttgtcgaacaaccagttgcgtgagttaccgccggcggttgggcagatgcatggcttgacccgcttgtccctgcaaaacaaccggatccgcctgactgccgattccgcggcgatactttcctcacgcatcacactcaaggctctggtgctcaattcaaaccctctgagcagggcgccggacttcagccaaatgaccaatctgcactcgttgggcatgggggccaccggcctcgatacgtggcctaccgggttggacgagctccccctgttggacatggtgtacctgcgaggcaacaatatttccaccttgcccgatgcgctggtcgcaccgtcggatgagcaactggaacagacactgcgggtcacccgggtcaccgacctgggcctgaacccgctgtccgccgatacgcgtcaacgcatcaacgcctacggcgaccggctcaccgccacagaacgagcagccaatcgattggtcgccagcgtgacgagtgcggtggatggcccggtggagctgcatggcgcggatgctccgtttcggcgctggtccacgggcttttccactgagcaattggcgcagcgccggctccagtggttcaccctgcgtgcattacccggttcggacggcttctttgaagtgctccgggacctggaaatagcgcccgccggtcttgaggacttgcagcgccgcatctgggaggtgatcgatggcatcacgcaaaacagcaatgagtccgagcagttgcgcaaggagatgttcgagtgggcggggcgggcggcctgctgtgaccgggcggcattgaccttcagcaacctggagatcctgctgatgacccacaacgccaaggcgctcgctttggactcgacccagggtgcggccctgctgaagctgtccaaggggctgttccgtctcgatgagctggaaaagatcgccctggaggatatcgaccagcgcagagccgcgatcaccgcacgcgagggcttgacccccacccaacgtgagagggccttgagggccgtggaagaggttgaggtgcgcatggcgtatcgccatgggctcaaggatcgccttgaattgcccggtcaaccacagcacgcccggtttgcccatttcggcaatgtgacccaggaaatgctcgatgcggcctacctacgggtgctcagcctggataactccgcccaggagttgcaagccatgctcgccagagacttctggaaagactatgtggcgaataaataccgtgcgcagtttgaagcacagaacgacccccatcacgatcaaatggaagccttgcagcgcgatttcgaggccgggacactgcctcgcgccagctacgacaccaaggtcaaggcattgcaggcgcagttcgagatcgaagaagcgcaattgatcgaacgcttgagtcgcgatgaagtggcgcaggcgctgattccgacggcaagccttgaagtcttggtagaaagcgccggccccgggctgcaactgtctcaggcgcaagccatcgactttaatggcaagcgctacttcgtggcgagcatgcccgatgcgggcgatggcgagcactacgtgttatgggtacaagcggcggataacccgttgcgtttgaccagcagcgcaatcgtcgccaagcctgatgtcaatggagtgtggcgacgtagaggcctggcgggcgggatggtgcagccggggtccgacgatgagtttgtcgatgcttcggaatccatgccggtgaagccctataccacggccgaactcagttacatgcgccgggaagtgcacttcacggccaaccctaatccggtcggcagttacatccgcgccaacaatggcaagtaccccctcagggattaccagggcaggccgatccgtatccgctccctggaaaggcaagtgaccttggactccggcacccaatacacctccgcgcaggtcaaaccctacattcagtttgaagggtatgagcacgtcggcgcacgctatgaagcgcaactgcaactgcgcacattcacggcacaggatgtgaaagtgccgggcgaaaaggcgttgatcggccagtccatggtggtggccaaccggcgtattgccaaaggggaaatcgtcggtgtatacggcggtaccgtattgccgtcgggtatcttcggcgagggcggccagacctacaccatgaaggtgggcagccagagggttgcccagggcaatagtctggtggagctgccgatccatttgtcgggggacaatattctgtcgcggataaacacccactttgagtacgacgacaacggcaagccgctgcgccaggcgccaggtggctataacgtcgagacggtggggtttgatgtcgaggccgatatgtggctgggcgtggggccaggggcgcaggtaaagcgcaaacccttcatcctcaacgctcttttcgccacagaagctatcgccgcgggcaccgaactgcgcatggactaccagtacaccgaggggatgataaaaaagcagttcgcctgatcctacccgcatcggtaatcggtccgtcgtcgtaaatagcgctatcccatcttgaaaggcggcgttttgccccaatcttgtgggcatatccaggcggtacacagccattgcatgacgtctgtgtgccgccgcttaacttatgacgcgccctgacatcaattcccaggctgccagccatggcgtgccgtgtggcgggctgcgcgatatcgataacggatggtgatgcccccatggatttcaaagactactacaagattctcggtgtcgagccgacggctgacgacaaggagatcaagtcggcttatcgcaagctggcgcgtaaatatcacccggacgtcagcaaggaaaaggatgccgaatccaagttcaaggatgcgtccgaggcctatgaagcgctgaaaagtgccgacaaacgcgccgaatacgatgaactgcgcaaatacggccagcatggccagccgttccaggggccaccgggttggcagagccgtggaggctttggtggcggccaggacgcgggcgatttttcggactttttcagttcgatcttcggttcgcgcggcgatgccttcggtggcggccagcgccgtcctaccgggcgcaagggccaggatgtggagatgcagctcatggtttccctggaggaaaccctgtccaccgagtccaagcagatcagcttccaggtgccacagtacgatgcttccggtcggcatgtgagcaacaccaccaaaagcctgaacgtgaagatcccggccggtgtggccgatggcgagcgcattcggctcaaggcccagggcgcgccgggcattggtggcggggccaatggtgatttgtacctgatcatcaagttcgcaccccaccccaagttcgaggtggacggcgaaaacctgatcatcaacctgccgctggcaccctgggaactggcgctgggcacggaagtggccgtgccgactctcaccggcaagatcaacctcaaggtgcctgccggcagccagaacggccagcgcatgcgcgccaagggccatggcttgctgaacaaggccgggcaacgcggctatctgttcatccagctcaaggcggtgatgcccaaggcggcggatgatgaggtcaaagcgctgtgggaggccttggcacaaaaggccgcgttcaatccgcgcgagcagttctgaacgggtcattgatttagttagcgccaggcgcaaaaccggcgtgcctaggatgacaacctcttccaagaaaaaggttgtcatcctatgccggactttcaggtcaccgaccccgccactccgcttcccggtgagcagggccaacattacgagctgatcaaacaggcgattcccacttgcctggtcaacagttcgccctcccgccgcaaggccctcaaagatacgccgccggccattccccgctggtatgacgccgcttcccaagcccgtaaagatcagctcaaagtgctgctggatgcccgttgcgattcgctcaacgagctggagaaaaccttcagtcacatacgctcggagcaagcgtttgcccaacccttgctggaagccaagctaaaggctatcggccatgagctggacgtcaatcaaacctggttgcgcctgtatgtaccggtcgaagatgcctttggcgtaaaaaccggtggcttcagggtcaaaacgttctccctgctgcacgctgccctcggcaactttgagcaacgggagactcgagagggctatttcaacagcgcctcaggtttcattacccaaccggacgtgcgcgatcatttcgagcgccacaccacgaccctgaagattcatgcgttcacccagctgtgccgagacctggacctgggcaagcagtaccaggctcacctcaaggcacagttgaaacctgacgacgccaaatcccaagccgaactgcgcgaacgttacgtccggcatcagaaagccgccttcaaggcggcggcgtacctggcgttgctcaaaggcgacattggcgacagcgaccacgcgctgctgatgcgggtggcggccggggaaaaacatattctcagcgacggtaagcccatcgggtatcgcagcctgagcctgatgaacctgcatgtgcacgattgcctggtcatcgacacttgcgccaagcctggctacacctgctgggtcatcgtctatattcccgatgaccccgaccatcccatcaagcgttatgaaagcttcaatgactttcgcaatgatttgaccgagcgcctgagcgcgaaaaccacccagcaagctgaccgctcccaaggctggaaggctacgccgaaccagcatttttttgcccggttcgttgccgacaaagaccgcgcctactactacaaacgactgaccgaactggtgctggacgcacctccccagccgtttggtgcacaggccttgcgatcggagtgggggcgcttgctgacttctccgtcctttgccacgccttcggcactgggcgaaccccagccctacgtgcgtgtgcatgccactgcccctgaattcaacattcgcgcccacaccctgacggacctatggcaagttgcagacctgtggacctatcgcctgggcagcctgcgtacgcggctgttcgagaacgcccggcatcgtgcggtgagcaccgccgatgtcgatgaggcctcgcgttcactgcgcgctgcgcattacctgagtatcggcctgttcggcctgaacctggtggccatggcggtgccgccgctgggtgtggtgatggccgtggcgatggccgggcaaatgctctacgaagtcatcgaaggtgtcatcgagctgagcgaaggcgaccgtgaagcgggctgggcgcacattaccgatgtggtggaaaacctggcgacgctggccgcacaggcggcggtgtttcattttaccgtctcgccgttcatcgagcagctcaaggctgtcaccttgcccagtggcaagacccggctgtggaatcccgacctatcggcctacgagcactcctcttcgttaccagcggtggcagcggatgagcagggcctgcaccggcacaacggccaaaccgtgctgccattggagggtaaacgctatgccgtgcaacaagacccgctgaccgagcaataccgtatcctccatcccacacgcgccgaggcctatcaaccgatattgaagagcaacagcgctggcctgtggaaccatgaagtggaacgcccgcacacctgggaaggcgccacgttgatgcggcgattgggcccggtgacggagggcttcagcgatgccgagttggagcaggcgcgcagcgtggcggctgtgagtgaggacgtgctgcgccgcgtgcatgtggaaggcgagccggtaccggcgatcctgctcgacaccctgcgccagttcagggcgtatcgcgatgcggtgaacgtcgccgagggcattcgccagggctcgctcagcagcgcactgtgcagctatgccgcatccctggcggtggagttgccgggatggccagcgagcaaggcgatcgaggcatttgccggcaccgagttgagcgggccgtcgatcaaatacggtaatcagcaggccgcggcggcggacaccgtgcaggtccaccgcgccgatttgatgagcggccagttgcccatacgcattatcgaagcgctcagcgaacctcagcgcgatgctctggtgggcagttacaccgcccgcacacccgaggcgagaaccgaggccctgagattgaaactcgaacaaagggccatcgaggtgcgcgagcggttgatgaagagtatctacgtcgagcagcagccaccctccgacaccgcgattatgctgatccagcgcgacttcagtggcgtgccgacgattttggcgcgcgaagtgctggtggacgcgacgccgagcgagcgcgacacgatgaaccgcgccaagcgcattcccctgcgcctcgctgaaaaggcgcgccgggcgcagcagcaaatgcgcctgaccctcgcgtatgaaggcttgtacctcgacgcgttggccggcccagacaccgaaaccctggccctcaacacactggcggcgcttcccggctggtcggacaatctgcgtctggaagttcgcgaaggccggcttgaaggcccgctgcgcgccagctttggccctctggaggcgagcaatcgcaaggtgctggtgcgcgtggaggatgggcgctaccaagcctttgatgagcgcggccagcacctgcatgggctcaatggtttctatggtgctttgcagcatgcgttgaccgatgcccatcgcaacgcgattggcgtgccccacgtcggccagggtgagcaattgaaggggttgatcaagcagcatgcaataggccgagtaccgttgcgcaaagccttgggcatgtcgccggaaaaactggcgttttttcgaccgccgagcgtgttgccgggtgagcgtcgcggctatccattgagcgggcggggtggcactgattgggagaggatcacacgggaacggattcgcagcctgtacccggagatcacccgggacgaaatgctcgccatgatcaacgagcgcggcgcgctggatctgagctggctgcgcgcgctggagcaagagcacaagaccctgcaatccaccttgcataaatggctgagcacacaacccgagggcatggaggcgtttggtgaacagcatcgcaagatgctaagggccaggcgcaagatttatgcagcgctggatgacgcctggcgaaaggttggcccacggcactacgacagaagtgggcggctcttggggcagaaaatcgaatggttggaagaggacctggcgcagcagttacggaccttgcccgcgctgaccgcagacttcgaccatgtcagttacctgggcattgtcggaaccgcaggctcggagctggcggatgcggacgtgcagccattgctcgcgaactttcgcgggctgcgtcgattggggatcgaggctgctcaactgacacgcctgccgtccgccatcgaacacatgccgcatctgcagcgcttgcatttgggcggcaacgatattgtcctgacgcctgaagacgtcctgcgcttgaaagatcgggtgcatctcaaggagttgtttttggacatgaacccactcggcttgccacccgatgtcgggcgcatgccgcgcttacagaccttgctgcttaatgacacaagcctggaggagtggcctgccagtgtgttccgtgtgcccaggccggaaaatttcattctggatatgcggcagaacccaatagcgcggattcccgagttcgcgccgggctcggataaggcactgattgtggcgaaaaccttcctcacccgtgaagagctgacgcctgagctgcttgctcaattcaagcggtacatcgaggccgctggccgcgatccggatcgccagttgcccaagagaggggcgctggacagccagcagtggaaaaccggttattcggcgcaggagtggccctccaggcaagtgttgtgggacatgttggaagagtcgtttggctccgagggttttttcaatcttcttcgtgccgtcaggcgttcgggggatgcgacagccgctagcggtgtgtggttgccagagctgacagcgaaggtctggcgcatgctcgaggccatgggcgaggatgcccagttgcgcgagcaactgttcctgatggccagggaccccgcagcctgcgtggacgccggagcccagatgttcaatgcgatgggcgttgccgtgctgcattggtcggcgtacttcagcgaggatgtggcctccgtgcgcaaggctgtcttcaacctggccaggggcaagtggcggctcgatgagttgggccgtatcgcccatgagcgcgtgtcccaactgcaggccgacggcgtcaagtttccggagtacgacgcgcaaggcgcacgcgtcgatcattacgatgcccacggcaatgtgatcgccgatatcgacgaagtcgagatctacctggcgtacacaacgccactggcaacccgcctggacctgccctggcaatcgcggagcatgatgttccgcgaggattatgtgacggcgcccatggtcgagacggcattcaaccgcgtacaactgctggaccaaggcgaactgctgcgtggcaacctgctggagcaaccgatgtggaccgactttctgcagcgcgctcattccgctgactacgcgccgattgccgcaaagttcgatgcactgatcgactatcaggccgcgcaggaacaatgggctggcgctgcccacctccccgagagagcgaggcaggccctgcgtcaaaccatcagccagacggcccggcgcctgggccgatcggcttcggaaagtgaaccggggcagttgatgtcccagcaagactacgatgacacctttggccgcatcaatgccgacctgatcaccttgaaccagacgctgaccgatcaagcgatcagcgccatcctctagaacaggaagtaccgctgggccatcggcaacacctcggccggttcgcaccacagcaactgaccgtcagccttgacctgataggtttgcgggtcaacctcgatatccggcaggtaatcgttgtggatcaggtcggttttctgcacatcgcggcaacccttgaccaccgcgatctgcttcttcaggcccagggcctcgggcagtccggccgcctgcgcggcctggctgataaacgtcaggctggtggcgtgcagggagctgccgaagctggcgaacatggggcggtaatgcaccggctgcggcgtcgggatcgaggcgttggcgtcgcccatcaggctcgaagcaatggcgccgcccttgaggatcagcgtgggcttgatgccgaaaaaagccgggcgccacagcaccaggtcggcccatttgccgacttcgatggagccgacgatatgactgatgccgtgggtgatcgccgggttgatggtgtatttggcgatgtagcgcttggcgcggaaattgtcgttgccggggccgtcgccgggcagcgggccacgctgttttttcatcttgtcggcggtctgccaggtgcgtgtgatcacctcgccgacgcggcccatggcctggctgtcggaactgatcatcgagaacgcgccgaggtcgtgcaggatgtcttcggcggcgatggtttcgcggcggatgcggctttcggcgaaggccacgtcttcggcaatgctcgggtccagatggtgacacaccatcaacatgtccaggtgttcgtcgatggtgttacgcgtgaacggccgcgtcgggttggtggagctgggcagcacattggggaaaccgcaggccttgatgatgtccggtgcatggccgccaccggcaccttcggtgtggtaggtgtggatggtgcggcccttgagcgcggcgagggtggtttcgacaaagcccgactcattgagggtgtcactgtggatcgccacctgcacgtcgtaggcatcggcgacgctcaggcagttgtcgatgctcgccggcgtggtgccccagtcttcgtgcagcttcaagccgatcgcaccggccttgacctgctcgatcagcggctcgggcaaactggcgttgcccttgccggtaaagccaatgttcatcgggaacgaatcgctggcctgcagcatccgcgcaaggtgccacgggccggaggtgcaggtggtggcgttggtgccggtagccggccccgtgccgccgccgatcatggtggtgacgccgctggtcagagcctcttcgatctgctgcgggcagatgaagtgcacatgggagtcgatgccgcccgccgtgaggatcatgccttccccggcgatcacttcggtgctggcgccgatggccatggtcacaccgggctggatgtccgggttgccagccttgccgatagcgtggatgcggccgttcttgaggcccacgtcagccttgatgatgccccagtggtcgatgatcagcgcgttggtgatcagcgtgtcgaccacttcatgggcgagcaactggctctggccctggccgtcacggatcaccttgccgccgccgaatttgacctcttcgccgtagacggtgaagtcctgttccacttcgacgaacagttcggtgtcggccaggcgcaccttgtcaccgacggtggggccgtacatgtcggcgtaggcttggcgggtgattttcatgtgtgtgccctgaagaataggtgttgaatgtgaaatcgctatcgcaggcaagccagctcccacagggggttgcatttcaactgtgggagctggcttgcctgcgatgaggccctaaaggtcgcccatgactcgccctgcaaacccaaatacccgccgcccaccacccaaatccaccaactccacctcccgacgctgccccggctcaaaccgcaccgccgtgcccgccggaatattaaggcgcatgccacggctggccgctcggtcgaattccagcgcgtcattggtctcgaaaaaatggtaatgcgagcccacctgaatcggccggtcgccgctgttggctacgccgagggtgagggtgcggcggccgacattcagttcgatctcgccaggctggatctgatattcaccaggaatcatgcaggttgccccagggtcttgaagtagatggcggtcgggctgtagcgcccgtccgggctttggcaatagtcgggcagctcaccgatcttggtgtagcgcagcgactggtaaaaggcttcggcgccggagccggcctcggtgtccaggtacaacaggccacgcttgtgctggcgcgcggcgagttccagggtattcatcaattgctggcccaggccatggcgacgggcgctgctgtgcaccagcaacttctgcacctcggcgcggttcaggccgttggctttctggcacagcgccaattgcacgctggcgatcacctgctcgtcgcgcaccaccacccacagcagcaggctgctgtcctcgacaccggcttgcacgctgctcaggtagtcccgggcctgggcctcatcgaagtcggccatgaagcccaccgaagcgccatgctgcaccgcgtccagcaacagctcgatcaagccccggcggtaatgggcaaagctttccgcattgactcgacgcagttgtgcagcgctcatcgatgtcactccttgggcggttgtgcgcccgggttcaaggtcagttgcataaaggtcaggtcgagccagcggccaaacttgatacccacctggggcatttgcccggtggtgataaaacccaggcgttcgtgcaggcggatcgaggccaggttgccgctttcgatggccgcgaccatcacatgtttgccacaggtgcgggcgcgctcgattaacgccgccatcagccctggaccgaggcctttgccgcgctggtcgttgcgcacatataccgagtgctcgacgctgtagcgaaagccttcgaaggggcgccagtcgccgaacgaggcgtagccggtgacctcgtcattttccacggctaccaggatcggatagccctgggcctggcgcgcactgaaccaggcctggcggttagccaagtccaccggttgctcgttccagatcgccgtggtgttcaacaccgcatcgttgtagatggcgcgaatcgccggcaggtcgtgttcggttgcatcacgaatcatggccgcgcctcaggcaatgggctggtggacggtgaccagcttggtgccgtcggggaatgtagcttccacctggatatccgggatcatttccgggatgccttccatcacttgttcgcggctgagcagggtggtgccgtagtgcatcaggtcggccacggtgcggccatcgcgggcgccttccatcagggcggcggagatataggcgatggtctccgggtagttgagcttcaccccgcgcgccaggcgccgctcggcgaccaggcctgcggtgaagatcagcagtttgtctttttcccgtggggtcaggtccatggttcagggtccttcataaaattcattcctaaatgcaaagaagatcccatgtgaagctgatttatgtgggagctggcttgcctgcgatacaggcgactcggtgtatctgatgtaccgaggtgatgccatcgcaggcaagccagctcccacagggggcaggttccacagtttgatcttcatgtgctccagattcgtggtgatacggcttcgcgtccaagcatggcggggcgcaatagccgccataaatcaatcaaccacccccgcgccagcagcgcttcactggccaaacaacgcgccaccagtaagccaggcaattgggtcaaatccccgcgcaccgcgtggggcagtgagcggcattgctcaagcagttcaggagcgatctcgccggtcaccagcaacgtggcaagcaccggctgcccatccagcccgataggcgaatccaacaacccatcggcgcccacaatgcgctggcgctcgtgccagagcaactggccgtcgcggcgaatgtccaggtgcgattgaaagtggcccaggtcgaaccgttcgccactggccgggcggcccagggcgaccacatcccagtagaacaaccgcgcatcgcccagcagctcgattcgcgtggtgagttcggcctgggcggcgctgaacacgatggtttcctggggcagccattccagggtcgcgccggcttccacggtcagttccagttgttgaaacgccgggccgctggcgcggtaccacttggcggcgccggggctggtcagttgtgcccaggctcctgtgccgacatgggcgctgatgtccaggcgatcgccaccggcaatcccgccgggtgggtgcacgatgatgtgctggcacacctcggggccttcggcgtacaggtgcttttgcacccgtagcgggcccaggtggcggcgcagcaccgggcgcgtggtgtctttgacacgcgcatagccgagttccagcgcggcgtgccagctgggcgtgaacagggcaggggtaacgggcaggttcatggcgtgtgcttatcgttaggaggctacagattagatggttaccagcccacgcacaccctcgctttccatattttcaccacggccctgctgcacgatttccccacgggacatcaccaggtactggtcagccagttcagcggcaaagtcatagaactgctccaccaacaggatcgccatatcgcctcgctccgcgagcttcttgatcaccgcgccgatttccttgatcaccgacggctggatgccttcggtgggctcatcgaggatcaacaagcgcgggcggctggccagggcgcggccaatcgccaactgttgctgctgcccgccggacaagtcaccgccgcgccgatgcttcatttgcagcaacaccgggaacagatcgtagatgaaggccggcacttccttggcttcggaaccggggaagcgcgacaggcccatcagcaggttttcttccacggtcagccgcccgaatatctcccggccctggggcacgtaggcgatgccggcatgcacacgctggtgcggcttgaagccggtgatggccttgccttcccagttcactgcaccttccttggccggcaacaggcccatcaggcacttgagcagggtggtcttgcccacgccgttacgcccgagcaggcaggtgacttcgccgatcttcacgtcgaaggacagcccgcgcagaatatggctaccgccgtaatactggtgcagcttgtcgacttgcagcattctcaaaacctcctcaatgtgatcgttcccacgctctgcgtgggaatgcataccgtgacgctctgcgtcaccgttgcgcagcgggacgcggagcgtccagcgtggcattcccacgcggagcgtgggaacgatcagccgttcgtgtcagcgttagcggccgaggtaaacctcgatcacccgctcgttttcctgcacctgttccagcgacccttcggccagcacgctgccctggtgcaacacggtcacgtggtcggcaattgagccgacaaaccccatgtcgtgttccaccaccatcaacgagtgcttgccggccaggcgcttgaacagttcggcggtgaactcggtctcggcgtcggtcatgcctgctaccggttcatcgagcagcaacagttgcgggtcttgcatcagcaacatgccgatttccagaaactgcttctggccgtgggacagcaaaccggcggggcgatgcaccgaggcggtgaggcgaatggtgtcgagcacttcttcgatgcggtccttctgctcaccgttgaggcgcgctcgcaggctggcccacaccgacttgtcggtcttctgcgccagctccaggttttcgaacacgctcaaggcttcgaacaccgtgggcttctggaacttgcgcccgatgccggcctgggcgatctgcacttcgctcatgcgggtcaggtccagggtttcgccaaaccaggccttgccgtggctgggccgggtcttgccggtgatcacgtccatcagcgtggtcttgcccgcaccgttggggccgatgatgcagcgcaactcgccgacgccgatgtacaggttcaggtcgttgagggccttgaaaccgtcaaagctgacgctgatatcttccagggtcagaatggtgccgtgacgggtgttgagccctttgcccgcgacctggccgatgccaatcgcatcgcggccgctgcctgcgtcgaaaataggttcaagcatgacgttcctcatttcttcagcaggccgataacgcccttgggcaggtacagggtgacgatgatgaacagcgcccccaggaagaacagccagtactcggggaaggccacggtgaaccagctcttcatgccattgaccacaccggcgccgagcagcggcccgatcaaggtgccccgcccgcccagcgctacccacacggcggcttcgatggagttggtcggtgacatttcgctggggttgatgatgcccacctgcggcacatacagcgcgccggcaaggccgcacaacaccgcgctcaatacccacacgaacagcttgaaaccgcgcgggtcgtaaccgcagaacatcaggcggttctcggcatcgcgcagggcggtgagcacacgcccgaacttgctcttcgccaggcgccagccgatgtagaggctggccaccagcaacagcaccgtggcgataaacaacaccgcccgcgtgcccggttcagtgatgccaaaacctaagatgctgcggaagttggtaaagccgttgttgccgccgaacccggtctcgttgcgaaagaacaacagcatcccggcgaatgtcagggcctgggtcatgatcgagaaatacacacccttgatccgcgagcggaaggcgaagaaaccgaacaccaaggccagcacaccgggggccagtaccaccaggcacaacgcccacaggaaatggtcggtgccggcccagtaccagggcaattcggtccaggacaagaaggtcatgaacgcaggcaactcatccccggacgcctggcgcatcaagtacatgcccatggcgtagccgcccaaggcgaagaacaaaccgtggcccagggacaacatcccggcgtaaccccacaccaggtccagcgccagggcgacgatggcgtagcagagaatcttgcccaccagggtcaaggtgtaggccgacacatgcagcgggttgtccgcagacaatagcgaacacaggggcaacgccagcagcaggagcaggatgactgcacctaccgccatcgtgactttggggccggccttttgcgtggccgtaagcatcaatggctggttcatcagtcgatcacccgtcctttcagtgcgaagagtccttgcgggcgtttctggataaacagaatgatcagcgcgaggatcaggatcttgccgagcacggcgccgatctggggttcgaggatcttgttggcgatccccaggccaaaggcggccatgacactgccggccagctggcccacgccgccgagcaccaccaccaggaacgagtcgatgatgtaactctggcccaggtccgggccgacgttgccgatctggctcagcgccacgccgcccaaacctgcgataccggaaccgaggccgaaggcgagcatgtccacacgcccggtgggcacgccgcagcaggcggccatgttgcggttctgggtgacggcgcgcacgttcaggcccaggcgcgtcttgttcagcagcagccaggtgagcaccaccacgaacagcgcgaaggcaatgatgacgatgcggttgtacggcagcaccaggttgggcagcacctggatgccgccggacagccaggccgggttagacacttcgacgttctgcgcgccgaacaccagacgcaccagctggatcagcatcagactgatgccccaggtggcgagcagagtttccagggggcggccatacaggtggcgaatcaccgtacgctccagcgccatgccgatggccgcagtgacaaagaacgccaccggcaacgcgatcaatgggtagaactcgatggcctggggcacatagcgctgcatcatcaactgcaccacataggtggcgtaggcgccgagcatcagcatctcgccgtgggccatgttgatcacgccgagcaggccgaaggtgatcgccaggcccagggccgccagcagcagaatcgagcccagggacatgccgctgaacgcctggccgaggatttcacccatcatcagtttgcgtttgacctgggccaggctggtttcagcggcggtgtgcacggcggcatcggcttccacgcctggcgccagcaacgcttcaaggcgcgtgcgggccagcgggtcgccggtgctgccgagcaagcgcacggccgccaggcgcaccaccgggtcgggatcgaccagttgcaggttggccagggccaggctgagggcgctgtgcacctgttcatccgtctcggcggcgacctgctggtcgaggaatttcagttgtgcaggcaccgcgcttttttgcagggtgcgcgctgcgtccaggcgcaccttggggtcggcggcgagcagttgcaggctggcttgcacgttattgatcaagccgcgcaggcggttgttcagacgcacggtcttggtttcgccgttgagcgtgagttggccttgctcaagggcatcgaccaactcaatacgcgcagggtcggggttggcggcccagtcctgcaggagtttggcttgctgcaccgggttggcggcaaggaagtcttcggcgtcgctggcgtgtgcgcccaagggcagcaacagcagcagggcgaggatgaggcggtggagggcagtgggcatataaaaatgtcctggtcatgcggggacagtgtgggagcaggctgtgtgggagccagctcccacagtgaccatgttccacattcgaactgtgggggcgttagttgctcttcacggcatagtccggctttttgtcattgcccggaatgtaagggctccacggctgtgcacgaatcggcgcttcggtctgccacaccaccgagaactgcccgtcggcctggatctcaccgatcatcaccggcttgtgcaggtggtggttggtcttgtccatggtcagggtgaagcccgacggcgcggcgaaggtctggccgcccagggcttcacgcactttgtcgacatcggtggacttggctttttccgccgcctgcgcccacatatggatgcccacataggtggcttccattgggtcgttggtcacggctttgtcggcgcccggcaggttgtgtttcttggcataggctttccagtcggccacgaacttctggttcaccgggttctccaccgactggaagtagttccacgccgcgaggttgcccaccaacggtttggtgtcgatgccacgcagttcttcttcacccaccgagaacgccaccaccggtacctcggtggctttcaggccctggttggccagttctttgtagaagggcacattggagtcgccattgacggtggagaccacagccgtcttgccaccggcggagaacttcttgatgttggcgacgatggtctggtaatcggcgtggccgaacggggtgtacacctcttcgatgtctttatccgccacgcctttggaatgcaggaacgagcgcaggatcttgttggtggtgcgcgggtacacgtagtcggtgccgagcaggaagaagcgcttggcgctgccgccttcttcgctcatcaggtattccaccgccgggatcgcctgctggttcggcgccgcaccggtatagaacacgttcggcgacatctcttcgccttcgtactgcaccgggtagaacagcaagccgttgagttcttcaaacaccggcaacaccgatttacgcgacaccgaggtccagcagccgaacaccacggccaccttgtcctgggtcagcagttgccggcctttctcggcgaacagcggccagttggacgccgggtccaccaccaccggttcgagcatcttgccgttcaccccgcctttggcgttgatctcgtcgatggtcatcagcgccatgtctttaagcgaggtttcggagatcgccatggtcccggacaacgagtgcaggatgccgaccttgatggtctcggcggcctggacggtccaggtcaaacccatggcagcaatggatgccgacaaagtgaaagccttgatcaagctgcgacgcttcatggtgcgatctccgtaaaccaatagttgttatggggcagatacacagcgctttgcaaaggctgtgcctgcgacctgccgcaacggttttaacggggattcagggccaggcagcggcggttatgcaccagcctggcgctgcaagagaggacgcaggcgtgacgcgcctcaaaaaagggcgccggagcaatatgcagcgcaagcttggcgcgcgggtatcccacgatggtcacttctttcgactatccaggtgctttcatggacgattcttctgcgcgtgacaaacgcgcggcactgcctcgcggccacgccaaactggggcagctcagccccgcctttatcagcactgacgatgccgcgcgttatattcacgagcaaatcggtagccagcgtgaggtggagtacgccagtgtcattctgcggcgcctgagcgataacctgtacgttgccagcgaaccgcgcgcgggcaagcccaccacgttcgactggaatctgttgctggaccgcgaacatgcggccggcgagttcgtgaaccccgagggctaccagattgtggcgagcctgcactctcaccccagttctctggactttgtaaaacgtacttaccccaagtggacgctgcagcagatgcaggcgttcatgagtttttattccacgccggacatttacttcaatcaccaggaccgtgcgcgttttacccaggcttatctctcggggccagatggcgcgctgttgcgctacacacccagcaactccgccgccgaggccgggtttgtgcactggctggacaccaatgggccatggtcctcgccccatgcccatgacggcacgctggaaggcatctacaaaaagctggctgcggtgggccggttgacctttgtgcaatccagcgctgcctggggcagttcgacaggggatgttcccgccgactggcaaccctatcagcccttcagtgcgccagcgatgccattgccctgcgggccagtgtttaccagcgctgagcaggcgttgtcgtatgcctggtcgcgcattcagcgcgctcccaccgcccggcagcgggtgctgttgctcaagcatgatctgcaagagttgtttgtcgcggcgcagccggaactcaccagtaccgtcagcgatcagttgcccctgttgccgacagggcttcacctgctgggtatctactttcactcccggcccttgcccggccaataccctgacctggatacctggctgtataagaactttgtcagcccgttggagctggccacgcatatcgcgcaatttcggcagtatgcgctgggggcccaatctaccctgggcgtgtcgttgtacatccgcatgcgcgacgaggcgatcctgcgctatcggttttcaggctcggcggcggagactgcgttgtttacccgctcgagcacgggggaagtgggtgacaacggcacgcaggcggccttgcaagccggtacgttgttgacccgggcgttcgtcttgcgggtggcggcagccggggaattgaccgtcgagaaaaccagtgccctgtgggaccgtgccggcgtggtcgacgcacagtggaaaccctattccctggtggccctgcccagcttgagccgtggctttctcagcgccgatgatgcggcccgtcatgcccacgaacgcatcggcgcacggcgtgatcgcgagtatggcgggacgatcctgcaacgcgcagatggtcgttatgtggcgaccgagcctgtggcgactgggccctggccgttcgcctttgcggggctgtacccgaaggaccggcaaggcgcgccgatcattctgcacgccgggtgccggttgcaggggctttacggctcgcgcatcgccctgtcactggccgaccccgccgaggcgttgacgctcaagtggacgcgtcaggatgccgagctcaacgggcagatgttccgtgaccaggacgtacacccgattttgcaggccggggtaaccgcttatctgtccggcgccgaggactgcctgatcgcctaccagccagggcacacgacagccgagtgggtgttgcattggcaagccgaagccatcagcggtatcagccagatagccaagaacctggccaatggcacgatgaaacccgccgatgtggtgcgcaaactggccgaggccggcaccttgcgggtggtgatcggcaatgcgttgtgggggccgagtgggtccatcgaactggattggggcccgtacgtgcgcagtattgcctggcagcgtcccgagcagccgagccatggcgcgctgtttgagagcgccgacgcggcggccttggatgcgctcgctcgagtaccttacaacccggagcaacaccgctattttttctgttttatccttaaacacacgtcgcgcaatgactacgtggccagcgagtgtgtgccgatcaccctgcaatcaccgatgctgacgcttgccagcctgtacgcgagtaccggccctgatacttatcagctgcccgaggggtttgagtgtgaggcgctttattacaccaaccaatgggccggcaatggtgccacggcctggctggagcgctgctttatgttgcctgcgcacctggacatcgccgtgtcccaggcacgtttgatcacacgcgggtccgctctgggcgcggcggtctatatcgcgacaccccagggggctttgctgtgctatcgctcgtcatcgcccaagtccttgtttgactcgcaaagcgagggcgacagcctggagacgatcgaggccaagttgaagggcggcacccttgaaccgctgaagtttattcgcaaggtcgccgaggcgggcgagctgcgtgtggtgatgcagagtccttgttgggaccgcactggcgcggtcagcaggttatggaacccgtatgcgaacctgtcacgccgtcgcttgagcccggtctttgtgtcgatggacgacgctgcccgctacgtgcgacggcgtgttgcggtgacgcaattgcaggcgtacggcgggcttatcctgcgtcgcgatgacggcgggttcgtagcctccgagcctttggtgattgccgatgaagtcttcgatctcaaatggattttccccgatgagctggtgacgcggggggagtaccccatacgtaccacggtggtagccagctatcactcgaggcccgcgtcccaatggccgtttttgctgacggcggccgaagcctctgtgtacagcaatacgttttccacccgcttgctggctcatgccttggaggctggtgagaagcgcctgtatcactacctgctggggcctgacggttcgctgacctgcctatggcccgagccgcggggcaagtacccgcaaattaccgagcaacaactggtcacccaccccaaaagccgtcatgactggctgaccgcgccactggaacgccagatacgggcaggggaactggcgccgtcggagtacgtcaaccgtattgcccgcagttttaccctgagtgtggtgcagggcagtgcgatgtggggggagccgggcgtcgtgtccgggtggagcgcttttgcgacgcccgccaaaagtgacggccagtatgcccaggcgcgccatgagcccgcgtacagcccgatgttcatccaggccgacgatgccgtgcggcatgtccacgggcagatggcgcagcgctcgcaattgatgttcgggtacgtcctcaagtcgatggataacggtggctacgtggcgacgttgccggtgagtgacggcggttcgaagctggctcgccgccgggtgttcagcagtgcgggctatccgtatcgctacggcttggcgggcatgtatatctgtgtgcccgaacaggcagatttttacccagcgggaggtgtgcgcacgggagatgatgtctaccgagggttgttctcgcccaccgaactgctcggtgcgtttcatcaggtgcaagccacgacagctcgttcggtgctgccgatgtatttttcttgtgctgacggcgccttgctcaagtttgtcgcgcgcgatacgcggggtatctcatacagcgatgcggtcaatctgcgcctgcgcttgttgagcccgacagactatatccaacgtgtcgcggcggcgggggatctgcgggtgttgcagtccagtgcaagctggctgggggcgggggtagtcggggcccactggcagccgggccgctcgcgtgcggtcattcctgcgggtgagcgccagctgggattgggaccgttgcacgctcatcgcgatgatgccgcgtggttctcccaggcgtatgtcggcggctacacggaccagcagtacctgagtgctctgttgacggaccctatgggcagcagccatcttcccgtattgccaatgctggacgacggttttccttcctcgcacgctgaaggtttgtttgatagccgcgggttgccgggcaaataccggatcacggcagcccatctgctgttccacgcaggccttgatcagccggcggatgtggcgcagaacgcttttcgtactcacttcgtgtcgtggcgcgagttggcgtattacgttcacgagttgaagcgaaagggcttgccgatcgtcacgttctatctgtctgcacgggatggcgcactactcgcctatgccccgcactggagcactgaggaatacaacctgcttgccacgcccgacaaatggtcggcccggacaggctataccgcgcaggctccgacgccttcgcacttcatctccgcactcgcgcgaatcggccagcttcgcgtggtgcgcagcggggatttctggaccgtgcgtggggtcctgggggctcagttgaaactgtcgatcagtcgtccccccaaggatgaattgtgaacaccactgcctgcgtcaggcggagcctgaagtgggctctctgtggccaagaacacgcgacagcaccaggcgatccaatgcccacacggcgatcaaggaagcccccaccaacgggaagataatcgccagcccgagcatgatcgccatcgcggttttccatttgggcaggtcgtggcgtagcggcggtacacccagcccaccctgcggccgacgcttccaccagatcaccacgccgctgaccgcgctgagcagaatcatcaggcagatcaccagtacgatcagttggttgacccagccgaacatcttgccttcgtgcagcatcacacccgtctcggtggcgcgtgcgaccaggttgtaatgatcccaacgcacatcggccaggaccttgccagtgtactggtccacgtgcagggtggcgtcgttgcgcgggtcgtcggcgaacaccgcgacggtgaacacaccggtggcggtggtggggaaggtgatgctgtagccgggctcgaccttgcgcgcgttggccaggtcgaccacctgttgcaggcgcaccgtgggtgcggccgggcctgcgtgcattgcgccgtgattcatgtgttcggcgtggtcgcctgacatcggcatcggcgtgttttccaaggcccagggcacggtttgctgggtggccgtgttgagcacacgggcctgctggtcggactgcggcacgttgttccacatcgctgccgggaaggtgttccacaggtcggcgtattgcttgccccagaaaccggtccaggtcataccgctgagcagcatcaccagcaggaacgccgcgccccagaaaccggcgacagcgtgcaggtcgcgccagaacaagcggccacggctacccaggcgcggccacaacaccccggccgaggacttgccccgcggccaccataggtacaggccggacaccaccagcatcacgccccagccagcggcgagttcaatcaggcggtcgccgacggtgccgatcatcagctcgccgtgcagggcacgggcgatggcttgcaggttgttttttgcatcctgctcaccgaggacggtgccgcgatacgggtcgatgaacactgtcacttcgtgggcaccgttgcgcatcacgaattgcgcgctgcgagtggcgtcggcagggggcaggtatttactgatcgcggcgtgagggtaggcggcctgggcgcgctgcagttgctcgtcggcgctcagcgcatgttcggcggcgggcacggtgagcaggtggccgtacatcagcgggtcgagctggggtttgaacaggtagatgatgccggtgagggccagcagcaccatgaagggggcgacgaagaggccggcgtagaaatgccagcgccaggccaggttgtagaaggagatcttttgcgtggtcatcgggtgctccgcataaggcttttgatttttcttggtctgttacatcgtcatcgcaggcaagccagctcccacaggggcctgtaatccatctgtgggagctggcttgcctgcgatgcttttagaagctcatgtccaccttggtccagagcgtacgccccggctccttgatggcctgcgggtcgttcgccgggtaaccgaagcctgcgttaccggccaggttcaagtgctcggcataagccttgccgaacaaattgtcgaccccggtgctgaccttgaagttcttgttgatgcggtatgccgcattcaacgagaacacgccaaagccgccacttttgtcgtagtccttgccaaccacgttgcccttgttcgagtcgatgcggttttgtgcagcaactagccgccacaaggcgccggcgctccagtcgtcttcgctgtaagtcaggcccaggcgcgtgtccagtggtggcatttgtggcagggccttgccgtcgctgctgttcttgccccaggcataggcgaggctggcgtcggctttccagtgttggctcagcttgtacgccgcgcccacttcgccgcccatgatgcgtgcgtccacattgcgcgcctgggaggtggtgcccatcatgccgggcctgtagtcgaacaggatgaagtcgcgcacctggccgacatagcccgaggcccaggcttccaggtcggcgctcttgtactgggcgccgaagtcgagctgggtggttttctccggtttcacgctgtcgaaggcattcaccgagccgcccgcgccggtgttgggggaaaacagttcccagtaatccgggaaacgttgcgcgtggcccaggccggcatacagcgtggtgggggtgtccgccaggtcgtgctcataacgcacaaagcccgagggcaatgtatcggcgcgggtgtcgccggcagtcgggttcgggcgcgacatcattcccgagccggtgcgttgacgaaaatccttcgccgaggcgcggtccaggcgtgcgccggtgatcaggcgatcgttgtcggcggcgtaccaggtcaattcgccgaacacgccgtagttgtggaaattggcgtccttgttgcgcggcaaatccttgtaggtgtcgatgcccatactgctgcgcgcacggtgttcattggtctgcgcatccaggccgctgatcaattgcacatccgcccagcgccaggtcgccttgatgcgtgcgccaagggtgcggcggtcgacgttagacgccatgggccccgccatcatgccggtgcccgaagggacgcgcaggctgtagttgtccatcacatggtcggcgtagttgtagtagacctgggcttcgaccttatccaacacctcgccgagattggatttctcgaaacgcagccccaggctttcgcgcaggaactgcgagccgtccatgccacgcccggcgtagcgcgcctcgccgtcgccacgcccggcggtgagttccagcagggtgtcggcgtcgggcgtgaagcccacggctacgtcaccgttccacttgtcatagcgcgaggcgacggtgtcgttgttgccgtccttgtaatcgtcggcatgggcctggttgccgataacgcgcatgtagcccaatgggccgccagcagcggcatcgatgaccttgtcgaaacgcccgttggagccggccaatacgctggcgttgacccgcgtgcccaactcgccgaactgctccggctcacgctcgaacaggatggtgccggcagacgcgcctgggccccatagcacggtttgcgggcctttgattacggtgagcttgtcgtaggtttccggcgagatgtacgaggtgggggcatccatccgcccagggcacgcgccgagcatcatgccgccgttggtgaggatattcaggcgcgagccgaacatgccgcgcagcaccgggtcgccattggtgccgccgttgcgcaccagggcgaagccggggatggtcttgaggtagtcgccgccatcgctggcgggcaccggttggcgcgggtctttggggttggtgaccacggtcagcggtgagctgggggcgatagcggtgatgaccgtggggctcagctcatgctcgccggcgtgagcgtgggcagccaatagtgcgccgcataacgcggtgagcagggcagtacttcccaaacgggtgtcagcagaaaacctggacatgacaaattccatcaatcaatcgtaaacaacacggccagcagcctacggctgtctgtctaaagtcggccggggtgaagtaacgcggtgaagggcttacgaagcgatgggcggcgcacggctacgggcgccggggaagatgctctgccgggcatggcccaggcgcgtggcgggggtgagggcgttggcgggcggcggggtgccgagggttacgtaggagacgctgccgggcagggccgggcaactgaacagcaggtcgcaatagccgcacttggcccagagtgcgtggtgttcggcgggggcttgggtgtgatggggttcgccgtggtcgctcggcatctccatgggcatttccatggacataccggcgtgatgatccatcggcatcgcctgggaaatcagcggaccgataaagatcatcagcatggcgaacaggctgatccaactgccgcgcttcacgcggtagtggggagacaacctggcgcgaggggcgcccatcgaggttggcttactgagcgtgcatatgctcgtggccagccatcggtggcactttctgcactgacacttgcacctcgaccttgccggctttctcgaagatgagggtcagcgggaattgcttgccatcggccagcaggctgcggtccttgaggcccagcaacatcacgtgataggccatcggtgcgaaggtcagttcacccttggccggtacggccacgttgggcacctgttgcatcttcatcaagtcgccttgcatcacatgctcatgcagctcggctttttccgctaggggcgtctcggcactgagcaggcgatccggcgtcttgccagtgttatgaatcacaaagtacgccgcgacggtgggcgcattcggcggcaattcctgggaccagggattgctgacctccaagtcgccgaccttgtagtcctcggcattggcagcactggacaccggcagcagcaacgcagccagaagcagggaagatttgagcatggcagttctccagaacggttctaaacgcagttcacttgcgaagaaaatcagaccgttggagaagcgcgggggttaaggcttggccattgctggcgcggggtgggattgcgcaataagcgcggcggcaggctctgcaccgcctcgaagcgtgtcacatataactgcggcacatgccccggcaacgccaccaacggcgccgaacccgagcaacaccagcaatgctgcatagccgagtgatcgtccggcggtgccgggatttccagcttgcccagggcaatcgccttaaggctggcgccattggacgaacagaacccgccccacatcagacgcttgatcgggtcatcggtctgctgcatcgcactggccaacggcatggcaaacgcattgaacagcactgcaaggcaggcgatccaggcaattgcaaagcgttgacgggccatggcggataatccgtagggttaaacgatcaggcgggtatttagcctgatcgagggggataagtaaaaagggcgggtgtggtttggtgtcgcagtggtgggtttgaggatagacgagaacggccgcttgccaattttgtagaagggacgcagcgcaccaggcgacgctgaacactgtgggagctggcttgcctgcgatagcatcacctcgttccaactggaagaccgagtcgcctgcatcgcaggcaagccagctcccacctgcccagccccccgctcaatcgtttgcgcgttcattgatgtgcgcttggtaagagggtggtcaacgcggtcaatcgcggcccatatcaaccaaagtgaacgctaaaccacatacggttttatcggataaatattgcacggctatccttgcgtttgagtgggtttccaagctgagtcgataggaatcccatccacctgtagctccaatcggtaacggtaatttcactggccctttggactcgtgtggcattccaagcgtttttcggatgctgtcttggttcattgagagggtgaggggtacaggcagttcaccggaatacttgggctcgccttgtgccagtgaaatcaggcaaaaaacgattcgctccaatctcatggtttcggcccaaaaccaaagctcaacgcctggctctggtttatgaatgaaatgggagttttgaccgttttcaaataatggctttattgacccggcacgaagtaagccctcggcaacaaaatcatcgtaggtgcgtcccaagcgttttaccaagcgatcaatgtttactgcttccatcctagtaccacccctggttttcgttgaccttatgcattcgggtgcgtgccatctcgagatcagtctcagcgaagccgtgatccaggaggtatggcttgatagcatcaaaattgttgtctgccgcctgacgaagatcgtcggcatctaacgtctgctttttctccgtgtttcgccaaccgtaagtctcactaaacttttgatggatgtaagacggaatagcaatgctcgcagcattatttaacgcttccttgagctgcttctctgtaaagcttattgcatagcgttcgagatgacgtcttatcgctgcctgcgagggtatgtgatccacgtgcaacccgttgcgcagtcgtccactgaacgcaccgtaaatatcaacttccaacggcctgaccgccggcttggcaaacaccaaatacaacggcgccacacccgaatcagccggaaacgaaatgatcgtatcctgccaggtgatgttttctgcatcccgccctggatagtgactgatcgccgaatcttgccccaccgcaatcggatgaacaaacatgttatccaagcgttccggtgttccgggatacgggctcggcacgctgacaaccgggccgaggttcggcgtccatgtgatgctgatgccatccagcaccgcgaccatcgcgctgtgatcctcattccaccgggcttgcgcaacgggtacgcggtcggcgccactgccaggttgggtatgtaggccgtaagcacgcagttcaccggactcatcctggcgaaactgaaaacgcactcgcgtgctggccaaacgcatcccttccaactgctccggggtgtacagcgttgagtcaccgatatcccgtggccagaaggccagcagcacgaggttgagggcggaaccggcgccggccaaccctcgtacggcccaggcaccgaggtcgctgccgagtgtgccggctaccctgccgacggcgcccgnnnnnnnnnnnnnnnnnnnnnnnnnnnnnnnnnnnnnnnnaactggtgccctcacaaccgctggttaccttgccacccaccgtggtggttgaaccggtggtgatgttgtagcgcctcacatctgactctccacgcgataaccagcctttagaagaccaggaataccctcgccgtccgcgtactccaccacctgagccaggttttgcaggctgctcgtcacggtgtcgccgttgtcggtagcgctgccgacaatggcgatgggcagacctttgtaggtggctgcgaaacctgctcccgagacaatttcgctctctttgccatcggggtagcgcactcggtcgccgacgcatgcgatgtgcaagtcatggatctcgaggctggtgcttgcagtgataatttctccgcccatacgtgttcccgagccgagcgtcgcgtagtcgtagatggctttgattgggcgagttgatggttggctttcggtagcggtgtctttcatgtttcgtcctttttattatccgcacaggagggcccaaacacagtcgtggcactgacttatgcaaaggaaatggcgcgcaaatggcgcaagaaagatggtgctggcaggcgcaaggccaaacaactgtccgttcggctaggtattgggaaaaacagaaacgtcttacacggctttgaggttgcccctaggacactccatatctagtctccttacaccgctgcaaacgaagcggtcgggcgtcgcggcccggattgattaagctccccttgcgttaaggagcttcacaatgaacaaaaacaccctcaatacccccatccggctatttaccgtggccgatggaatcagcaccgaagacctgctggtcaacctcagcgaaacactcgcctcggccaatgcgctgagttgcgacctggcctttgacctggaaggccctaaacgagaggagttgctgggtgttgcacagttgatcgagctggcgcagttgctggctgatcgggtgcacagtggtgtcgggccgggggcagccgcaagccgctagcaacacagtacaaatgtgggagggggcttgctcccgatagcagtgtgtcagttgctgatttgctggctgcgctactgcaatcgggagcgagccccctcccacatgagattgtggcgtttaaagaatgctgattgcctgtagcaccgctgacgttgctgtgcattcatgctggttgatattgcaaattatgcggcgggtacgccgtggacctgcatatcgacacccagggcttttctaatcacggcaaaaatcgccgcaaggttatccatgctggggttgccgctggccgaaagcattcggtgcaggcttttgctaggtttggcggtttgtttggcaaggccttcaaagcctactgtggcgttgactaaatcacgcaggatcacgcgagatatttccggctcgccattgagaaatagcgtagcggcctcgtcgagaagcgcctgggcgaatgcagggtctcgctgggcacgttcagcgatggtgtgtttgtagctacgggtaagcgccatgctggtcacctcttttgtttcaatttcttgtcacgctgatactcattaatcagcgactttacgaccttgatatcgcgcttttgactggacttatcaccaccaccgaacaggatgattaatcgatgtccttctcgtatcaaatagattcgcaagccgggttcccagtcgatacggtattcgcctagcccatcgaaccacttgatgttgctggtgttgcctgtttcaagccgaactaaagcggttgaaactcgagttgccgctgggacactcaaggatgaaaaccactcatcgaacggactggaatcgttgtcgcgttggtattcttcgatctcaatcattagccatcttgaaggtaacaaataggttactaatcaagcaggcgagcgatcctgactcatcgagtgaagtttgccaacgcgctgagtgtttcttcagacgacaggaattccctgtctacttgagccaacaccggccgcttcaacaccaacaccggcaccccctgctcacgcgccacttccagcttcggctcggtggcggtgctgccgctgttcttgctgatcagcacatcaatccgccgttcttcgaataacgcccgctcgtcctcgatgaggaacggcccgcgtgcgccgatcacttcacagcgctcattgcccggatacacatccagtgcgcgcaaggtccagaactggttggcggggatttcgtcgaggtgctgcaagggttcgcgacccaaggtgaacagcgggcgcttgaagggtttgagcgcttcgaccaactcggcccagtcggcgacctctcgccaatcatcccccggctgcggctgccaggccgggcggcgtaatgcccagcaaggcacgccacatgcccttgcagccttggccgcgttgcggctgatctgagccgcataggggtgtgtggcatcgaggatcaggctgatgcgttcggcacgtacaaactgcgccaggccttcactaccgccgtagccgccgacccgcacctggcaggtcaggtcggtcggcacgcggcccacgccagccaggctgtagatatgttccggccccagggttcgggcgatggccagtgcttcggtgacaccgcccagcagcagaatccttttcataacggtttgaccacgtccagcaacgtgatcggcagcgcctggcgccaggtatcgaactcgcccagtggctgcgcctgggccacgtggatgcgggtcagttcgccgccatgcttggcacgccaggtcatcaaggtcatttcgctttgcagggtcacggcattggcgaccagccgcccgccgggccgcaggtgttgccagcaggtgtcgagcacgccgtcgcgggtgacgccgccgccgataaaaatagcgtccggtgcttccaggccgtttaacgcttccggcgccttgccacgaaccagctgcaggccaggcacgccgagggcatcgcggttgtgttcgatcaggctttgacggcctgcgtcggcctcgattgccacggcgcggcagcttggatgcgtgcgcatccattcgataccgatggagccgctgcccgcgcccacgtcccacagcagttcgccgggcatgggggcgaggcgggcgagggtcatggcgcgcacatcgcgtttggtcagttggccgtcgtgcttgaaagccgcgtcgggcaagccggcaaggcgcgacagacgcggtgcgttggcatcggccaggcagtcgatggcgaccaggttcaaatcggcaaccgccatgtgctcccacgcttgtgcgtgcccgccgatacgccgctcagccgggccgcccaaatgttcaaacacagttatccgactggggccaaagccgcgctcggccaacaacgccgcaatcaacgcggggctgctgccgtcattgctcaacaccaacaagcgcacgccactggccagatgcgcattaagtgccgccaccgggcgagccaccacggataacgtcaccacctcctgcaacggccagcccaggcgcgccgccgccagggataccgacgatggcgcgggcaaaatcaataactcttcagctggtacttgccgcgccaggctggcgccgacgccatagaacatcggatcgccactggccagaacgcacacaggctccccacgccgcgacagcaccggctccagggaaaacgggctcggccacacctggcgttcgccaccaatacacagcggcaacaggtccaactggcgttggccgcctataatccgcgtggcgcgcaacagggcgtgccgggcattcctgcccaggcccttgaagccgtcttcaccgatgcctacaaccgtcagccagggcgacatatcaattccttgaacgacatccgacgggcaggcttttcatgccgtcggacaaagcaggcataataccgcgcctttacctgtcaaccggtagccccgtgaacccaatgcccgctgtgaataccttgcgcccctcggcttgtccggggttgctgcgtattgtccaggcgctggacggcggcatttgccggatcaaactggccggtggttcgatcaccgcggatcaggccaacgccgtggcggacgcggctcgcatgtatgcgggcggggtgatcgaggcgaccaaccgcgccaacttgcagatccgcggcattggcgccgagcaggacgccttgatcgcccggttgctcgccgccggcctcggcccgaataacgcggccggtgacgacgtgcgcaacctgatgctcagccccagcgccgggatcgacccgcagatgtggttcgatactcgcccattggcgacacagattcttgccaccttgcaaaaccatgcgcggttccaccagctgtcggccaagttcgcgatacagctcgatggcggtgaagccctggcgatgctggagcatcaccatgacctgtggctgtcggcgtttgtgcgcgagggtcagacgctgttggcgttcggcctggccggctgcccgggggtggatgcgcccgtggcggcggtgccgctggaccagggccatgcgctggtggtagcggtgctggaggcctttctcgacctggcgacgcccgagcaaacgcgtatgcgtcatctgcctgtggataacgtagtgagccgtctgagcctgccgctgctgtcggcgcagggcttcaaacgcccggcgagcgatgcattgctgcacatcggcagttatccacagactcaaaagaatcagttttacgtcgcggcaatcgcgccattgggccgccttgattcgctgatgctccagggcgcggcgcaactggccggcgagtatggcgacggcaccttgcgcttcaccccttggcaaggcgtgctgctgcccaacattgaacgccctggcgccgtgaccgaaggcttggcgcaactgggctttctgtgttcaaccgaccatcccttggcgcgcatgatcgcctgcaccggctccagcggttgcggcaagggcttggccgataccaaggccgacgcggtgcaactggccgcgctgcaaccgggcgtcgaagctcacctgtccggctgcccgcgctcttgcgccgccgcgcacaccgcgccagtcacgttgctggcggtgagccccggtcactacgacctctattttcgcgacgcagcccacccgggtttcggtcggctgcacgcgcgcactctttccattgaagcggcgggcgccctgttacgcgctcgcccacggagcaacaccgatgattgattacatccgcgacggtcaggagatctatcgcaactccttcgccattattcgcgcggaagccaacctggaccgcatcccggccgacctggaaaaactcgcggtgcgggtgatccatgcgtgcggcatggtggaggccatcgacggtctgcagttttccgaaggtgcgggcaaggccgggcgcgatgcgctggccgctggtgcgccgatcctgtgtgatgcgcggatggtctccgagggcgtgacccgtgcgcgtctgccggccaataacgaggtgatctgcaccttgcgtgatgacagcgtgcccgagctggcgcgcgagttgggcaatacccgttccgccgcggccctggaactgtggcgtccgcatttggaaggcagtgtggtggtgatcggcaacgcgccgaccgccttgttctacctgttggaaatgctcgatgccggcgcgccgaaaccggcgttgatcctgggtttcccggtcggtttcgtcggcgccgccgaatccaaggcgatgctcgccgctgacagccgtggggtgccgttcgtgatcatgcaaggccgcctgggcggcagcgccatggctgccgccgccgtcaatgccctggccacggaggtcgaataatgcaggtgcgcggacgtttgatcggcctgggcgtcggccccggtgaccccgaactgattaccctcaaagccctgcgcctgctgcgtgaatcgccggtggtggcgtacttcgtggccaagggcaagaagggcaacgccttcggcatcatcgaggaccacctggtgccgcaacagaccctgatgccgctggtgtacccggtgaccaccgaagtgctgcccgcgccgctgtcctacgagcaggtgatcagcgacttctacgacaacgccagcctcgacgtggccgcgcacctggacgcaggccgcgatgtggcggtgatctgcgaaggggacccgttcttctacggttcctacatgtacctgcatgaccgcctggccgagcgctacgacgccgaggtgattccaggcgtgtgttcgatgctcggtggcgcctcggtactcggtgcgccgttggtgtatcgcaaccagagcttgtcggtgctctccggcgtattgccccatgaggacctcaagcgccgcctggcggatgccgatgccgccgtgatcatgaagctggggcgcaacttcccgaaggtgcgccaggtgttggaagagttgggcctggccgagcgggcgttgtatgtggagcgtgcgaccatggccaaccagaagatcgtgccgctggaccaggtggagccgatgtcttcgccgtatttctcactgatcatcgtgcccggtgaacggtggcaaggttgatgaccccggcgattgtgattctgggccagggcagcctggcgactgcgcgcaagctccagcaggtttaccccggcgcgttgatccacggcctggccacacgggttgaaggtgcagaccgcacctacagcgaattcggcgccacgttgcgtcagctctatcagcagggcacgccactgattgccctgtgcgccgcgggtattgttatccgcaccctggcgccgttgctgttggaaaagggcgaggaacccgccgtgctggcggtggccgaagacggcagcgccgtggtgccgttgctcggtggcctgggtggcgtgaaccttatggcgcgcgacattgcagcggcactcggtgtgtccgccgccatcactaccagcggcgagttgcgttttggcacctgcctgctcaacccgccggcgggctatcaattggccgatatcgagttgggcaaacgctttgtctccgaccttctggccggcgaaagcgtgcgtatcgaaggcacggcgccatggctggaggacgctaacctgcctcaggatcaacaagcgcgcctggcgattcatgtaggcagtgccgaacgcacaccggcagccaacgagttgctgatttacccgcagaatgtctacgtcacctgccggccgggtgcgcagttggccgagcgtgtgcgcacggcgctgcaggaggcgggtgtggccgtgcaatccctggcctgcctgctggccagcgacctgcagatggctgacgcgtcgttgcatgaagctgcgtcggccttgggcgtaccgctgcgttttgctgcgctgacacccgttgcggatatcagcattaccgtggccgagcagcccttggacctgtcacaggtggggcgcccgcgcgggcgtctggcggtgatcggcctgggccccggcgccgctgaactgatggtgccggcggtgaaggcggaactggcgcgttgcaccgatgtgctggggtatgaaacctacgtgcgcatggccgggccgttccgggacgatcaagtgcaacactgcactgacaaccgcgaagaaatgcagcgcgctcgccacgctttcgagttggctgcgcaagggcgttcggtggtggtggtgtcgtccggcgaccctggcgtattcgccatggctgcggcagtgatcgaagcgctgcacgagtccagtgagccggcctggcatcaggtcgacctggaaatcctgccgggggtttccgcttcgctggccaccgctgcccaggcgggcgcgccgctggggcatgacttctgtgtgatgtcgctgtcggataacctcaagccctggtcgatcatcgaaaaacgcctggacctggcttcccaggccgacctggccttggcgttctacaacccgatctcgcggtcgcggccttggcaactggggcgcgccctggagatcgtcgcgctgcatcgcacgccacagacgccagtggtgctgggccgtgacatcggccgcccaggccagacgctgcgcgtcaccaccttggggcaactgacccccgagcaggtggacatgcgtaccatggtgctgatcggttcatccaccacctgtgtgttcccccgcgccggtggcggcgagtgggtgtacacgccacgttggtatggcgacaaacccaactcctgaaaacagccccgttggctgccggaaagctccgaataacccagggattgctctggtgttgttcggggctttttcttttttctgcgatgaaaaccagaagcctgccgctcgcaccttgttattgctgggcgctggttttgggcggggcaggccaagggatgtttgtcgcatggaaaccccgctgctccctggactagtgtggaagcaagccccatgtggggtgtttgtggagaacagaaaatggagcgacgtcacagaaggatcaacagcaaaaaaaggcgcaagttgattgccgcctacaagttaccgggcgcacctgccaggcaggccacggcagtgttggatagcgaggatgattgcaatgcggccgtggtgaacaacggcgtgatttcgtttgccgaaggcttgtcggcgttgaaccgggaatacgtgcgcaaaagctatctgctggccagcagttatgtgagcgatgtgctgaaggtccagcggggcagcgaggcgtggtacgaggaatttatcaaggtcatggtcagcctggggtggctgccgctgcgcagtcgctttgagcgagtctcgcgtgcgggcaagggcctgacggtgcaactggcggcgctgaatatcatcgcctcgatgctgacgtcgacggcgctgtccgggccgttgctcagcgcattgccaaaactggccgccgatgcgctggacgcattgaagcgtcagccagcgtctttcgagctgttcaagcgcaattgcgcggtgcgtgagggcggcgatttcggcctggcctcctgcgctgaaacagacggcgagttgatcatggtgctggtgacctacagcacccatggtgtggataaacaggtgggcctgccgttcctggagtgggacagttcctcgttcgaggccttcagcgggcagacttgcctggtgctcaatacctcgatggtcaacgagaaaaccatacaactgatgcgcgaaagcgccggtgacaaagtcgaaatggcgatcgccaaataccggatctagggcaccaggtagccgcgtaccccggtaaaaatgatttgtgcggccagggcgcagacgaacaggcccatcaaccggctgacaatctgcaagccctggtcgccgagaatgcgttcgatacggttggacaggtacagcaccacgcccaccgtcaggctggccagggcaatactgaggatggcggtgagcttgtcatcccagtgcggttggctgacccccatcaccagcaaggcgccgatggtgccggggccgacggtgagggggatggtcagcggcacgatggtcacgtcctgctgcacattgtcggtctgcaccgccgacttgccctgggccatgcccagggcggagataaacaacacgctgccggcgccgatgcggaacgcgtcgacggtaatgccgaacacactgaaaatcacccggccaaacaggtagagcagcacgcttgataccagggtggccagtgcgactttccacgccaggcgccgacgctccttgctggaatagccacgggtcaggctgataaagcaggacagcacaaagaacgggctgtagagcaccagcatcttcaggtacacgctgaataacacatggagcatgggggtggctcgcgggcgggggaagtggggaggagtctatctgacagagatcaaatgtgggagctggcttgcctgcgaaggcatcgactcggtgtgcctgaatcaccgagttgactggatcgcaggcaagccagctcccacaggggatggtatttcaggttcaggatggggcgtgttccgggcgctgttggcgctgcgccacccagtagtccaccagctcgcgcagctgcgacagctccaccggcttggccatatgcccgtccatgcccgcctggcgtgcgcgttctttgtgttccgagagaatgtgcgccgtgagcgccaccaccggcgtacgcacgcgttggtggctcacttcccacgcccgcagttgctgcgtggccgagaaaccatcgaggatcggcatctcgcagtccatcaagaccaggtcatagcgctgggctttcatcgcttgcaacgcttcttcgccgttgctggcggtgtctgggttgaggttgagcttgccgagcatgccgcgaatcactttggtggaaatgctgttgtcttcggccaccaggatgcggaaatcgctgggcacggtgatggcggccggtgcgctgggggccgggcgtgccacgagggcacctttgctgcgctgggtcagttcatcggccagggtggtcttgagggtatagcccgccaccggtttggcgaggatgcgcttgatcccgcagttgcgcgcaatgatcttgctcggtgcgttactgatgccggtgagcatgatcagcaggatgtcgtggttaaggctcgggtcttccttgatcttcgccgccagttgcatgccggtcatgccgggcatgttctggtccagcagcaccacgtcaaagtaatcacgcaggtgcgccttggtacgcagtagcgccagggcctccttgcccgaaggcgcggcgctgacgttcaggccccaggccgtgcactgctgcaccagcactttgcggcaggtgtcgttgtcgtccaccaccagcacgcgggcgtccttgagcgggccgtcgaggtcgctggtcgggtgctccaggcgttccgggtccagcggcagggtcagccacagggtgctgccctggtgactgccgctcttgacgccgaactcgccgttcatcaacaggatcaactggcgggcgatgaccaggcccaggtggccgctcaagcgcgtcgccgacaggaagttcttgctgtgcagttcgctgtgcagcagggcgtcgcgttcggcagcttccatgggtacgccactgtcttgcacggcaatgcgcaggcgcggcttggtgctgcgctcatccagggcgacaacgatcagcacttcgccttcatcggttttgtgcagggcgttttccagaaggctcagtaaagcctggcgcagtcgcgtcgggtcaccgctgatcacccgtggcacctggggctggatgaagctgatcagctcgacattctgttgctcggccttggcgcggaagatactcatgcagtcgtcgatcaaggcattgagatcgaactgcacatcatcgagttcgatctggccggattcgagcttggaaatgtcgagaatctcgttgatcagggtgagcaactcgttaccggcgctgtggatggtctgcacatagtcgcgttgcttcaccgacaggggagtgcccagcagtaactcggtcatgcccagcacgccgttcatgggggtgcggatttcgtggctgatcttcgccaggaactcggccttggcggcgatttcggcgttgctggccgccaggtcgcggctgaggctgaagcgggtttcgacaatggcgcgctggcgctcgccgagggccaggctcatcagtaggccgctgaggcagataaagctcagcagggtgacgatcaggccttgtggcgccaccagggtgaggccgagcagggcgggcaggatgatcagcgtgccgatgttgaacaccaccatggccgccacgaacaggcgcgccgggcggtaacctttttgccagtgataggccgagacaaacagcatgctcaggcctgccagcgcgaccagggcataggtgatgatgttcaacggcaaggtgttgacgaacaacagcagcaggccgcacaggacgatcagcaggatgtcggccatcagcactttgttcagcgggtgcgggcccaggggcatgaagaagcggtaggcaaacatcagcccgcagggtgcggtcagcaacagggccaggtaggcgccaggggtctggatcgcgtgccagttcggcagccacggccccaccaggttgagtagcagcgccaggctaagcatcaacaggaactcgcacgcggccagccacaggctactgcgcgagcggtggtaggcgaagcgcgtgaggttgtgcaggatcagcatcgacagcacgccgaacagcaggccgtagatcagcgtctggttctggttggccgcggccagcactgcaggttccagggtgatgtaagggcgcagttcgtgttccgagaccagccgcaggtacacctccagaggctgttggctctggggcatcggtaacatgaagtcactgctgggcagcgggcgctcagcctggggttggcgagtgccggtgatttgttgctccaccagggtgtcgccgtccagcacgtacaggctgaggctggacaggtccggggcgaaaacccgcagcacttgttcgtgcttgccgggctgcaacctgaaacgcacccacaacgcaccgtccggctgcgcggcagtgatgcggttcagttcgatggggctgaattgattggtatagcgggcggaacggatgtcgctcagttgcaggtcggcctgttcatcaagcaataccgcccagccactgccttgcgcggcggcctgggccggtagcaagcagagcaaagtcagcagactgattgtgaaacctatggcgatcctgagccagcgcacggcgaaatcccttcggtagttggatgcacgggttaactatgcgcggggcgacagggtacggcaagggccaaaggcccttacctaaccgaacggatagctactgcaagtgtagctgctcagttgttctcgccgcgttcgcgggcaatggcacggtagccaatgtcggtgcggtagaagcagcccttccagtcgattttcgccgccagtttgtacgcctgttgttgcgcggcatcgacactggcacccatcgcggtggcgcacaatacgcggccaccggcggttacaactttgccgtccttgagcgcggtgcccgcatggaacaccttgccttccagcgcagcggcagcgtcgaggccttcgatcgcatcgcccttggcgtagtcggcagggtagccaccggccgccagtacgatgccaacgctcgggcgtgggtcccattgtgcttcgaccttgtccagggcctgggcgagggcggcttctaccagcagcaccaggctcgattgcagacgcagcatcaccggttgggtttccggatcgccgaaacggcagttgaactcgatgactttggggttaccggctttgtcgatcatcaggccggcgtagaggaaaccggtgtacacgttgccttcatcggccatgccacgcacggttggccagatcaccaagtccatgacgcgctggtgcacgtcggcggtcaccaccggcgccggggagtaggcacccatgccgccggtgttcgggccgctgtcgccgttgccgacgcgcttgtggtcctggctggtggccatcggcaatacgttcttgccgtcgaccatcacgataaagctggcttcttcgccgtcgaggaattcctcgatgaccacgcgcgaaccggcgtcaccaaaagcattgccggcgagcatgtcgcgcacggcgtcttcggcttcctgcagggtcatggcgacaatcacgcctttaccggcagccaggccatcggccttgatcacgattggtgcgcctttttcacgcaggtaagccagggccggctcgatctcggtgaagttctggtaatcggccgtcgggatcttgtggcgagccaggaagtccttggtgaaggctttcgaaccttccagctgggcggcgccagcggtagggccgaagcaatccaggccacggctgcggaacagatcgacgacgccagccaccagcggcacttccgggccgacgatggtcagggaaacattcttctcggcaaaatctgccaattgctccagggccagcacgtcgatggcgacgttttcgcacttggcttcgatggcggtaccggcgttgccgggggccacgaagactttctgcacgcgtgggtcctgggctactttccaggccagggcgtgttcacggccaccgctgccaatgatcaaaacattcatttcaaaaacctcgttaggatgatcgttcccacgctctgcgtgggaatgcctctacggacgctctgcgtccgagggacgcggagcgtccctggctgcgttcccacgcggagcgtgggaacgatcaatcagtggcggaagtggcgcatgccggtgaagaccatcgcaatgcccgcttcatcagcggcggcgatgacttctgcatcacgcatcgagccgcccggttggatcacggcggtcacgcctgctttcgcggcgttgtccaggccgtcacggaacgggaagaacgcatcggatgccatcaccgaacccaccacctgcaaaccggcgtgttctgccttgatcgctgcgatacgtgccgagttcacacggctcatctggccagcgccgacaccgatggtctggcggttcttggcgtagacgatggcgttggacttgacgtacttggccactttccaggcgaagatcaggtcgttgatctcttgctcggtcggcgcgcgcttggtcacgactttcaagtcgtcgctgccgatcatgccgatgtcgcggctctgtaccagcaggccgccattgacgcgcttgtagtcccaggcggcggcgcggtctgccgaccactcgccacaggccagcaggcgtacgttggctttagcagcgacgatggcgcgggcttcttcgctgacgcttggggcgatgatcacttcgacgaactgacgctcgacgatggccttggcggtctcggcatccagctcgcggttgaaggcgatgatgccgccgaatgctgattcagtgtcggtggcgtaggccagttcgtacgcctggcggataccgccttcagcgtccgggctgacggccacgccgcacgggttggcgtgcttgacgatcacgcaggccggcttgacgaagctcttcacacattccagcgcagcatcggtatcggccacgttgttgtaggagagttccttgccctgcagttgagtagcggtggcgatgcccacttcggccggcttggcttccacgtagaatgccgcgctctggtgcgggttctcgccgtagcgcatttcctgggccttgatgaactggctgttgaaggtgcgtgggaactggctgcggccttcggtgctcaaggttggcgccgcctggttcacggtgcccatgtagttggcgatcatgccgtcgtaggcggcggtgtgttcgaacgccttgagcatcaggtcaaagcgctgggcgtaggtcaggccaccggccttgaggttttccaggacgctggcgtagtcgctggcgttgaccacgatggccacgtccttatggttcttggctgccgagcgcaccatggttgggccgccgatatcgatgttttcgatggcggtcggcaggtcgcaacctggcttgttgatggtggcttcgaatgggtacaggttaacggccaccaggtcgatcggcttgataccgtgctcggtcatgatggcgtcgtcgataccgcgacggccgaggatgccgccgtggattttcgggtgcagggtcttgacgcgaccgtccatcatttctgcgaaaccggtgtagtccgcgacttctactgcggccacgccgttgtcctgcagcagtttgaaggtcccgcccgtggagaggatttccacacccagggcttccagctcccgggcaaattcgaggatcccggtcttgtcggaaacactgatcaaggcacggcggatcggcaggcgggtggtctggtcggtcatctcaatttccatcaaaagcaaaggaagtcagcaaaaaaggcgaccggttttacgcgggcgcctttctggtttgattgaatgcttacagcaaatcgtactgcttgagctttttgcgcaaggtgccacggttgaggcccagcagctcactggctttggtctggttgcccttgacgtagttcatcacgctttcgagcaagggcgcctcgacttcggagagcaccaggttgtacacatccgtgacggaagcgccctcaaggtgggcgaaataattgtgcagcgccttctcgacactcccgcgaagggtctggccttcttcgctcggcgtgttgaggtgctgtttcaaattgacgttgtcgctcacgggtgttgttccactcactaaagtctcggtcatcatcgtcatgcggccaccccttctccatcccctgttcccaggctcttgtcgcgtccggcgaagaactcacgaacggtggcgacctgtgcctgcgtttcatccaaacgattgaactgagcgcggaattccttggcgcccggcaaggtggcgagataccagccgacatgcttgcgagcaatgcgtactcccatcacgtccccatagaaggcgtgcagggcggccagatgctctagcagaatacgttccacctcgaccaactctggtgccggcaagacttcaccggtacgcaggaaatgctcgatttcacgaaaaatccacggccgcccctgggcggcccggccaatcaacaagccatcggcaccggtcgcgtgcagcacgcgccgggctttctcggcactgtcgatgtcgccattggcaaagaccggcatcgacacggcctgcttgatcgcggcaatggtgtcgtactcggcttcaccggtataaaggtcggcacgggtgcggccatgcaccgccagcgctgcaatacctgcctgttcagcgatcttcgccactgtcaggccattcttgttgtcccggtcccaaccggtccgaatcttcagggtcaccggcacatccactgcgccgacaacggcctgcaggatctcggcgaccaattgctcatctttcaacagtgcggaaccggcggccttgttgcagacctttttggccgggcagcccatgttgatatcgatgatctgtgcacccagctccacattggcccgggctgcatccgccagcatctgcgcatcgccaccggcgatctgcaccgagcgtggctcgggatcaccttcgtggatcatgcgcatccgcgacttgcgggtgttccacaaactcatgtcgctggtaaccatttcagagactactagacccgcgcccaaacgcttgcacagctgacgaaagggctggtcggtgacacccgccatcggggcgaggatcaagccgttttgcaatgtgtatgggccgatgcgtaccgccgacataggacttccctgttgtggggccggatcattagagttcgaaaaagggttggcatgatacccgctctcgatgacgggttaaaggctgaattggataaaatctgaacagttacttttttatcgccatcggtttggtcgacggcggccaagtcaataatccgccgtcaaacctcggtgggcacgccgtttcactcgggcgaatggaagctcaggctgtaatttacggctttgtttccggggtccaggatgtccagggagatgtggatcggcgtctgcgagggcatttcgctcacgccggccaactcgccgctcaggtattcggcgggcttgaagcgacgactggcaatcaggccgccgttcaggtccgcaaagcgtagctccagcagcgggaagggctgggagaaggtcgcgcggttatagaggatggcatccaccaccagcgccccggcgaactcgggatggctgcgcaccaccaggttgctgctcttgatatgggtaatgtcgacccgcgatggcacggtgcatcccagtttcgggcacagcgcctggaaccacgggcggtaggcatcctggcgggccaggtcgtcgaattggtaggcgatgtactggccggccaggcctgcggcggcgagcactaccagcactatccagaccaggcggcggccccagcctgacgggcgcttatgtgcatacaggtgcagagggtcgtcttccaggtcctggagcagctcgtcgtgtgcgccggcctccgttcttgcgcgcttgcgtcgcgcgaacgcgcggttttcgggttccggctcgtcgagggtgggggtcagcggcgggtcgaggtcgtcatccacggcggtggcgtgcagcgccggttcgtcatcgaggtcgtcggtgtgggccgacatggacggttcggtgcgctgtttggacgcaggagccttggccggctcgggctcttcttcaggtgcctgggtgcgctcttcgggtggctcactgaacaggctggccgcccatttttcttcctcggccttgaccgtatcgcggctggcgctgaaggactcttccttttgccgacggtcggcacctggctggcgacgttctgcgcccacggcctgggtgtgctggatctcgcgacgttccagcctggccagttccttgtccaggttatccaggtccagctcttcggccgtccactgcttctggctgatggcccgtggtggttcgggcggtgcttcgccagtcggttcgacggccggctcggcggtggacggcacttcaggttccggcgcagacgcctgggcccgttgctccagcaactggcgagcggcattgaacacttgcaggcacgagccgcaacgcaccacgccgcgggccacgctcaattgagcgtggttgacgcgaaagcgcgattggcaatgtgggcactgggtgacgaaactgtcggtcatgcggccatccgattcaggcaagcgctcattctagcgccgacgaccgctgatgcgtacccagccatcacggttggcgatcgggtccagctcgaagtccttggcgtaggccgccgccacgtcttcaccttgctcggccaggatgcccgacagcgccaggcgcccgcccggcttgaccaggctcgacagttgcggcgccagcgacaccagtggcccggcgagaatattggccaccagtacgtcggcctgaacctggggcaggtcctcaggcaggtagagtgggaacttgccttcggcaatgttgttgcgcccggcgttatcgcgggaggcttccagggcctgcacgtcgatatcggtgcctacggcctccttggcgcccagcagcagggcggcgattgccaaaatccccgagccgcagccgaagtccaaaacgttgctgtcggtcaggtcctggccgtccagccattccaggcacaaggcggtggtcgggtgggtgccggtgccgaacgccaggcccgggtccagcagcaggttgacggcgtctggctctggagcggcgtgccagcttggcacgatccacaggcgctggccgaaacgcatgggctggaagttatccatccagctgcgttcccagtcctggtcttcgatgacttcgctgtgatgctcgggcagcgggccgccggtgagcagttccatatgggccagcacggcggcggcgtcggtgccgtcttcgaacagggccagcaagtgggtgtgggaccacagcggcgtggtattgagttccggttcgaagatcggctggtcttcggcgtccatgaaggtcaccgacacggcgcccacttcgaggaacgcgtcttcgtaggtttcggcttgttctgggctgatggcgagacggacttgcagccaaggcatggcgggcacctttgaataaaatgagtgtgcggcgggctggccgcgaaagcgcgcaagtttacgcgagagcaagccagaagacgactgcgccgacgatcgttcccacgctcggcgtgggaatgccgcctcggacgctccgcgtcccgttgttaaggcgtggcgcggagcgccacaagaggcgttcccacgcggagcgtgggaacgatcagggggcggtgggccacaaacaacaaaaccgcccgaaggcggttttgttgggtggagcacttactggttggccagcttgtgttccaggtagtgaatgttcacaccaccttcgcagaagccttcatcacgaaccaggtcccgatgcagcgggatgttggtcttgatgccgtcgaccacgatttcgtccagggcgttgcgcatacgggccatggcctcgtcgcgggtcgcgccccaggtgatcagcttgccgatcagtgagtcgtagttggacggaaccttgtagccgctgtacaggtgcgaatccacacgtacgccgttgccgcctggcgcgtggaaatgcttgaccaggccagggcttgggataaaggttttcgggtcttcggcgttgatgcggcactccagggagtggccgtgcatcttcacgtcgtcctgggtgaaggacagcacgttgccagcggcgatgctcagcatctccttgacgatgtcgataccggtgaccatctccgataccgggtgctctacctgcacgcgagtgttcatctcgatgaagtagaagcggccgttctcgtagaggaactcgaaagtaccggcgccacggtagttgatgtcgatgcacgccttgacgcagcgtgccaggacttcctggcgggctttctcgtccaggcccggtgccggggcttcttccaataccttctggtgacgacgttgcagcgagcaatcgcggtcgcccaggtggatggcgtggccctggccgtcggacagtacctggacttccacgtgacgtgggttggtcaggtacttctccaggtagaccatcgggttaccgaaccaggcgcccgcttcggagcgggtctgcttggcggcttcgatcagctcttcttccttgtgcaccacacgcattccgcgaccaccaccgccaccggcggccttgatgatcactgggtaaccgacttcgcgaccaatgcgcagagcggtttcctcgtcttcaggcagtgggccgtcggagcctggaacggttggcacgccggccgcgatcatggcgtccttggccgagaccttgtcgcccatcaggcgaatggtttcggctttggggccgatgaaggcaaacccggatttttccacttgttcggcaaaatcggcgttttccgcgaggaagccgtagcctgggtggatgccatcagcgccggtcacttctgccgcagcgatgatgttcgagactttcaggtacgagttcgtggccagtggcgggccgatgcaaatgctttcgtccgccagcttcacgtgcatcaattcggtatcggccgtcgagtaaacagcgacggtcttgatgccctcttccttacaggcgcgcaggatacgcagcgcgatctcgccgcggttggcgatcaggactttttgcagtttcttcgcaggtttcaacatcgaaggcgctccgcggttcaaacgatggtgaacagcggctggtcgtactcaaccggctgaccgttttctaccaggatggattcgatgacgccggctttttccgcggtgatgtggttcatcattttcatcgcttcaacgatgcagatggtgtcacccactttcacggttttgcccacttcaacgaaggctggcgaggtcggtgccggggtgcggtagaaagtaccgaccattggcgacttgaccacgaagccattcagcgcaggcgcggctggggcggcaggtgcagcggcggcggcaggtgcggcagccggagcagcagcggctggagccggtgcttgcatctgtggcgcgtagaactgttgggccggggtcttgctgtgacggctgatccgtacggactcttcgccttccttgatttccagctcgtcgataccggattcttccagcagttcgatcagtttcttaactttacggatatccatgaatcatcaactcccaagggtcggtcaggggcgtttagcctgttcttcaatgtgttccagggcggcctccagggccagtcggtaaccgctggcgccaaggccgcagatcactcctaccgctacgtcggagaagtaagagtgatggcggaaagcttcgcgtttgtgcacgttcgataaatgcacttcgatgaatgggatgctcaccgccagcaacgcgtcacgtaatgcaacgcttgtatgcgtaaaagcggcgggattgatcagaataaagtccacgccttcgccgcgcgcggcatggatgcgatcaatcaattcatactcggcattgctttgcaggtagagcaaatggtggccggcttcacgggcccttttttccaggtcgaggttgatctggtcgagggtcactgccccgtagacgcccggttcacgggtgccgagcaggttcaggttgggtccgtgaagaaccagtaaggtcgccattggctgttccttgttattggtgtgggtgcgtcagaacccggcgactatgccgcaaagcctttgtgactgtccagttctatgcagtagccggcacgattagcgaggattgcgcaaaatttatgactgggagccggcatttggtcagtgtgggagctgatcgtgcccacgctccgcgtgggcacgcatccagtgatgctctgcgtcacggctttaaagcgggacgcggagcgtctggggcgacattcccacgcggagcgtgggaacgatcagccagctcccacattggaacgggtcagacgcggaaggcttgcacggcggtagtaagctgcccgcccagcaccagcaggtgttcgccctggctgcgaccctggccaatacgcagcaaattatcctcacccaattgatgaatccgctcactgttgtcgcgtatctcgctcacggcgccactctgttgcgcggtcacatcggcaatgcgtacggcggtatccgagatggtctggatcgccccgacgatctcatccagcgcgccatccgccgcctgggcttgctgggcggtggcttcggcgtgttcgacctgggcgcgcatgccttctaccgactggtgcgcggcggtttgcaggccggcgatcaggccctggatttcggcggtggcgccggcggtacgctgggccagggagcgcacctcgtcggccaccacggcgaaaccacgcccggcctcaccggcgcgggcggcttcgatggcggcgttgagcgcaagcaggttggtctggtcggcaatcgagcgaatcaccgtgagcacgccgccgatggtggcggactcttcggcaagtttctcgatcatctgcgcgttttgctgcacttcgcccaccagcgcatgcagcccggtgaggctcaggccgatcacgcgctggccttgctccacggcttggcccgcactgcggctggctccggctgcctggctggcatccccggcaacttgctggatggtggcttccagctcgcccagggaatcacggatttgcgcggtgtcgccggcctggcgttcggcgctgtcgtgcaggccgctgctcagttcggccagggcgcggctgctgcccgccacttcttcggcattgccacggatggtgccgaccaggtccaccaggtaggcgcgcaggcggttaagggaggcctcgatatcgtgcagctcgcggttggtcttgcctaagtcaatcggttggctgaagtcgccttcggcccaggtcgacaaggccggcgccaggttggtcagcacgcgcgccaggcggcgctgcagggtgtcgatcagcaatgcgatcagcaggatcaggccaatcatcacaccctgcatcacgcgtacttcaccctgaatcttcgcgtgttgcgcgcgcaccacgggttcgaggccggcgatggcgtgttgcacgttggtgatttttaggtgggtgctggcggcgaggtcggcgcgttgctggatctgctcgcgggtgcgctgcaactcggcggggtagcgggtcaacaggctgttgagttcgcgcttgaggtcgacgccagtgtcctgggcttcggttttttcggtgttttccaggcccatcagcgcggaaaaatcgtcggtgttggattctgcgctggcctttattcccaataagggcagttgcccgagcaggtcggcctgggttctcaggttggtcacttcgcgctcgacatccgcagccaactcggcgcgcccgctgctgaccagcttgtcgcgggccagagacagcttgcccaggtgctgtgaggcggcgagcaatggcggcatatagcgcgcagcctccgcagaattgacgccgctggcgtactgggtcagttgttccaggttcgcgcccagttctcgttcggcttgcagcaacagggcttgcgggtcgccagccaatttaccggcggccagcaggtcggtcttgctgaaggtctccaactccgcgaggctgggccgcaggctttgcgccaattcgggcggcagttcgcccagttgcagctgcaggctttccaggctctgggtggcactgctcaggcgcagggcatcgccgctggccaagtagtcctcgatgttgcgggcagcctggttttgaaagacctgggacaaacccaagtagcgctccatcaacaagtacgggcgctccagcgcccgttgcgaccaccacagcgtcgccccgagggccaggcacacggccaccagcagaagggtattgagattggtcagcagcttcaggcgcatgcggggtttcaaccgacggcaggagataagcgcctgaatttattgcgtttgtattacagcgttatgaccgaatcggtggattctggtgaaaagatggcactttgctttgatgtgcgagcggcttgcactcgattgcgtccggcgtccttggcgcggtacagcgcttcgtcagcctgggcggccatcattaagctgtcggaaccgtcgcacagctccaccaggccggcgctgaaggtgcaccacaaatcctgcggttgggcggggtagtggatttctgcaaagcgccgacgaatgtcgtccagcaccttgcaggccgattccaggtcggtgtcgggcatcacgatggcgaattcttcaccgccgtagcggccgatgtaatcggtcttgcgcaaacgctgcttgagaaacagtgccaggctcttgatcacccggtcgcccatagggtggccgtggctgtcattgacgcgcttgaagtggtcgatatcgagcatggcaaagctaagaggcttgttctcgcggcgggcgcggaagctgcaatcttcgagcagttgcaggatatgtgtgtggttgtaaagcccggtcaggctgtcgcgcaccatccgtgccttcaggttgcgtgcacgcgacgcacggttgcgcacggtggtgatcaggtgacgcggcttgatcggtttggtgaggaaatcgtcaccgccctcgctcatcgcatccagctgcttatccaggtcgtcttcagccgataggtagatgatgggcacgctgacgtagcggtcgttgtggcgaatcaccttggccagttcggtgccggtacaggcaggcatgtacatgtcgaggatgatcaggtcgggctggaaatccgccagctcggccatggcctggatcggttcgatcaaggtgcgggtgacaatgccggcactgttgagcaggcgttcggtgtgcagcgcctgggcccgcgaatcgtcgatgatcagcactttgtacggttcgtactgggccgcgcaggtcagcacttcgatcttttccagcaggcttgaggcttccaaggtgccggtcagaaactcttcgccaccggcgcgcacggcggccaggcgcgtcggggtgtcggtttcgtgcaggctgaaaaacaacagtggcagcttgtgctccaggccttcttgggcttctgcggcgagcttcaggcccagccccgtgccgcagaagtccacgtccatcacgatcgccgacggcaatcgctcggtcatggccgcgcgaaaggcggcgacgctgtccagagcgtgggcgctcatgccaaagaattcgagctgcttggccaggcgctcggcgcggtcatggtcggcgagcatcacgtagatcggcttgcgtatcggcggcaggaaggtttgctcaagctgatcgccctggcgcaggccggtgcgggacaggcgttgcatcaaacggttgagctcggtgatcagttggctgctcaggcggccacggttctcatccactgcttgcagggattcactgatatgccgtgccagttgcgtgtgttcgggctgttcgaagcgttcggcgaagcgctgcaggcgcaggttggcttcgctgagttcggaaaagtcggcgttcgaccactcgctgcgctgcaggcgctgccagatctcaagaatttgacgtgcctgatgaattacccgctgggcaaagtgctgcttgagacgctcgcggctggggtcttctgactcggtcatatcctgactactgtgagggtgcatgctgaggtcgactgatggcgctatgctagcacctcttttctgatagatgagtgtcatacgtcaattaagtctgcatgcctgagattcagttattgaccggctggtcgcccagcgtgaaaggtgtgcatcctttatagtccaagcggcccggtgcgccactttcgtgtaaaagccccgcaccgacgggcacgatggggtagggttgtggtcggagtgtctgaacgcacccggacaattgacgtgaatgaactcaagtgattgaaaggatatcgccatgctggactggaaaaaccgtgaaggcagtgccaaaggccccgcccctgagcccaagtcggccaaccgcagctattttcgcaacttgctgatgagccgggctttgctcagcatcatcggcctgtacctgctggtcaccggtggcctgggttggtactggagccaggagccggcgctgtttccggtgcagcaaaatgcccagcttgccgccgagaaggaaggcaagcagatggtggtcggctataccaccgtcgaaaccctcaagaccgtggtcggcaccttgctgaacaaaccgggcggttatatttccaacgaccgtttcccgccgggcttgtggatggacaacatgccaagctgggaatacggcgtgctggtgcaggtgcgtgacctcactcgtgccctgcgtaaagactttgctcgctcccagtcgcagtcggctgaagacgctgacttggccaaggccgagccgcgcttcaacttcgataacaagagctgggtgctgccttccagtgagtcggaataccaggaaggcatcaattccttgagccgctacgaagcgcgcctgtctgacccgaaccagcgcggcgcgctgttttatgcgcgtgccgacaacctcaacaactggctgggcgatgtggccacccgtttgggttcgctgtcccagcgcctgtcggccagtgtgggccgggtcaagctgaacactgcgctgaaaactgaggcgctggcgccgggtgaagtgccccaggtcgatgaagaagtggtggagaccccatggatgcagatcgacaacgtgttctacgaagcgcgcggccaggcgtgggccctgtcccatctgttgcgtgccatcgaagtcgattttgccgacgtactggccaagaaaaacgccaccgtcagcgtgcgccagatcattcgtgagctagaggcctcgcaggaaccggtatggagtcctatgattcttaacggcagtggcttcggtgtactggcgaaccattcgctggtgatggccaactacatttcccgggcaaacgctgcagtgatcgacttgcgtcagctcctcaaccagggttgatgatggacgctactcaaaaggaggccgcacaccgagcggcttccgatgctgaactgatctgctgggtcgacgagcaggaccacctgctcggccacctggtcaggtctgacctgcgccagcgcggcttgatcggccgttgcacctttatcttcctgttcaattccagaggcgagctgtgtgtgcaccggcgcacgctgagcaaggcgttgtatccaggatattgggatacggcggcgggtgggatggtggccaaaggtgagagttatgccgtttcggcagcccgcgagctggaagaggagttgggcgtcagcggtgtgcccttgaccgaacatgaccatttctattttgaggatggcgacagtcggctttggtgcaaatcctactccgccctctgggacggccccctgcgcctgcagcccgaggaggtcatggaagcgcggtttttaagcatcgaaatcatccagcaggaggccgaacaaaagccctactgcccggacgcccaggaagggttgcggcgctatctggcctcgcgtcgctaaagttgcaaaaaatggcgccatttggctcttagcaagtcggctttttgccgttacactgcgcgccttttcacccgaaccacattagcggttcggtagcgctgcccctgcctgagtggggcttcgcggtcggtcaccgccttgtgtggcgccgatcagtcttcatcctcccaagaggattgccggtggccaaaaaagccgcatccttcgccgcccttggtggcctggtattttccaccgacgcaggtcgacactgcccggactgtcgtcagcccgtggattcgtgcacctgcaaacagaccctgatccccgaaggcgacggtattgcccgcgtgcgtcgcgagagcaaaggccgtggcggcaagacggtgaccaccatcaccggcgtgcccctggctgaagaggccctgaaggaactggccacctcgctgaaaaagcgctgtggcaccggtggcgcgttgaaagacggggtcatcgagatccagggcgatcacgtcgagttgctgttggccgagctgatcaagctcgggtacaaggccaagaagaccggcggctgaaaacctcttcccaacctgtggctaaactctgtcctgccagtggggtctacttcccttgcaggcaaatcgtcattttcattctttagactgcgccagcctcgaacgagaggtggcgccttcgccttcatttataggggacttcgatgtccgtacgacgcacacgcaaagacgatggcagccaatggacagttgcggacagccgcagtgtttacgggattcgccattggggggccgggtatttcgcgatcaatgaagccggtcgcgtagaagttcgtccgaacggcccgaacagcacacccgtcgacttgtacgagcaagtcgacgagttgcgcaaaagcggcctgtcgttgccgctgctggtgcgcttccccgatatcctgcaagaccgcgtgcgccaattgactggtgccttcgatgccaacatcgagcgcctggaataccagagcaagtacaccgcgctgtacccgatcaaggtgaaccagcaggaagcggtgatcgagaacatcattgccacccagaacgtctccatcggcctggaagccggctccaagcctgagctgctggccgtgttggccttggcgccgaagggcggcaccatcgtctgcaacggttataaagatcgtgagttcatccgcctggcgctgatgggccagaagctcggccacaacgtgttcatcgtgatcgagaaagagtctgaggtagggctggtgatcgaagaggcggcgagcctcaaggtcaagccgcaggtgggcctgcgtgtgcgcctgtcgtccctggcatcgagcaagtgggcagacaccggtggcgagaaatccaaattcggtctgtcggcggcgcagttgctgtcggtggtcgagcgcttccgcgcggccggcctggaccagggcatccgcttgctgcactttcacatgggctcgcaaatcgccaacctggctgactaccagcacgggttcaaggaagccattcgttactacggcgaactgcgcaacctcggcctgccggtggaccacatcgacgtcggcggtggcctgggcgtggactacgacggtacccactcgcgcaacgccagttcgatcaactacgacatggacgactacgccggcgtggtggtgggcatgctcaaggaattctgcgacgcgcagagcctgccgcacccgaacatcttctcagaaagcggccgctccctgaccgctcaccacgccatgctggtggtgcaggtgactgacgtcgagaagcacaatgacgaaatcccgaccatcgaaaacaaggaaagcctgcccgaaaccgtgcaatggttggtggacctgctcggcccgaccgacatcgagatggtcaccgaaacctactggcgcgccacccactacatgagcgacgtggcggcccagtacgccgacggcaagctgaccctggcggaaaaagccctggccgaacagtgctacttcgcggtgtgccgtcgcctgcacaactcgttgaaagcccgccagcgttcgcaccgccaggtgctggacgaactcaacgacaagctggccgacaagtacatctgcaacttctcggtgttccagagcttgccggatacctgggccatcggccaggtgctgcctatcctgccgctgcaccgcctcgacgaagagccgctgcgccgcgccgtgctgcaagacctgacctgcgactccgacggcaagatcaagcaatacgtcgacgagcagagcatcgaaaccagcctgccggtgcacggcttgaacgaaggcgaggactacctgctggggatcttcctggtcggcgcgtatcaggaaatcctgggtgacatgcacaacctgttcggtgataccgactcggtgaacatctaccagcgtgaagacggttcggtgtacagcgccgggatcgagacccacgacaccatcgaagacatgctgcgctacgtgcacttgtcgccggaggagttgatgacgcattaccgtgacaagtgcgccagtgcgaagatctcggcctcggagcgcacccagttcctggatgcgttgcgcctgggcctgacgcgttcttcgtacctgtcctcgtaataaaaatgtgggagcgggcttgcccgcgatggcggagtgtcaggcaaccgttagggggctgacccaccgccatcgcaggcaagccagctcccacatttgggtctgcgttccttcagttcccgcccagccacagcccttgccgattcaagtgccaggcaattgcccacagcgtcaggctgcgcaccgccatgaacagcaggaaggtgatccacaatccgtggttacccatgtcctgcaacgcccaggcaatcggcagtaccagcagcaccgtcagcaacatcccattgcgcatctcccgcgcgcgcgttgcgccgataaacaagccatcgagcaaataactccacaccgcaatcaacggcaataccgcaaggtagggcaggtagatatcggcggtttcgcgcacgctggggatatcggtttgcatggcgataaatagatggccgccgaaggtgaacagcagggcgaagccgatgctggcgatcagtgaccaaccgcaggccacgactaatgagcgacgcaacgcctgccggtcacgggcgccgatggcgtggccgcagagggcttcgaccgcgtgggccaagccatccaatgcgtgagccgtcagtaacaggccgttaagcagcagcgcattggctgccacggtggcatcgcccaaccttgcgccttgcacggtgatcatgaaaaacaccgactgcaacgccaggctgcggatgaagatgtcgcggttgaccgccagcaacgggcgccagctttgccacagtttcaacgcggcccaggcgatatgccccggataggcgcgcagggctttttgcgtgagcgccaggccgagcagggcgccggtccattccgcgatcaccgaggcacgggcggagccgaccacgccccagtccaggccaattacaaaccacaggttaagcgcaatgttgaccaggttggtggtcagcagaatcgccaacggcgcccgcgcattctgagtgccgaggaaccagccgaccagcgcatagctggcgagggcggcgggcaggccgaacagacgggtgtggaaaaactcgcgggtcagttggttcagttctggcgaaggctgcatccattccagggccagatggctcaagggaatgcccgcggtgcccagcagcatcgccaggcccagcgccagcaacaagccttgcaacaggatctgccgcaacgccgcgccatcgttgcgcccggcggcttgggcggcgaagccggtggagcccatgcgcaggaagcccatggcccaggcgaggaaggtatacaggctggcaccgacagccacggcgcccagttggtgggcgtggggcaggtggccgatgaccatgctgtccaccagggccaccaacggcaccgagatattcgacaggatcatcggcgcggccagggcccagacgcggcgatgggtggggcggtggcgccagtcggtcaataaggtggacatgcagtctccttcaggggagcggcattgtacccggccaatgtgggagctggcttgcctgcgaaggcggcctcccagccgacgcctatttacctgacacccttcgatcctactgtgggagcgggcttgctcgcgaaggcggcctggcaggcgacacagttggattgggtatatatccattgctgcggtaacggctacttagggttccgcctgacggcgggtcactttggaaaagagccccaaagtaaccaaagggctcttgccccaccactcggcacctcgcctaggctcggtgtgcccgtaatccgccagtgatttggggggccgccgccacgcgccatccatggcgcggggcggctaaaccggcatccctgccggtttaccccccaaatccctgtcgaattccggccagcgtggtttgacggggcgcttaagatcaagatcaaaagcagatcaagagcagatcaagagcggctcgcttcgcatcgtggttaccgtcgggtgctacaggctgcaaagttgtgtggatagacaagccagttgctcccacatgttgatcttgatcgccaatggttgtgggatttggctcggcttcatgcctacctagaaccaaccgcccctccgtcggtcaatgtgaccggcaccgcagcggcttggtcggcgctgatatatagttcacccctcggttccctctgactatgagtgccccatgcttaacaaaggactgttcctggcctgcgcgctggccctgctgagcgcttgcgattcttccgataaacccgctgcaccgcctgcgcccaccgtggcggcagcgccgaagccggtgaaagccgcggtagatgtggcagcgctcaagcagcgttatgccgggcgtgagctgagcgtggtggacgtgtccgaggtgcagttggacggggccagcaccttgtcggtgagcttttccatccccttggaccccgatcagaaattcgccgacaagctgcacttggtagacagcaagtccggcaaggtcgatggcgcctgggaactgtccgataacctgatggaattgcgcctgcgccaccttgaaccgcagcgcaaactggtgctgaccgtggacgccggggtgaaggcggtcaacggcaacaccctcgccgccgaatacagcgcccgcctggaaacccgcgacctgcaagccaccgtcggcttcgccagccgtggcaccctgttgccgacgcgcctggccgagggcctgccggtgatcgcgttgaatgtcgacaaggtcgacgtggaattctttcggatcaaacccgaatccctgccgtcgttcctggcgcagtgggggcgtaataccagcctgcaaagctatgagtcccgtgaactgctgccaatggccgaactggtgtacggcgggcgtttcgacctgaacccggcgcgcaatacccgcgaaaccctgttgctaccgattgccggcctcaagcagttgcagcagccgggcgtgtacctggcggtgatgcgcgcttcgggcacctacaactattcgcaaccggccaccctgttcaccttgagtgatatcggcctatccgtgcaccgctatgccaatcgcctggatgtgtttacccaggccctggaaggcggcaaggcactgaacggcgtcgaactggaaatcctcgatgccgaagggcgcgtgctcggccagggcaagaccgaggacggtggccacgccgagttgccgctgccgaaaaaagcccaggtgttactggccaagcagggcgagcaaaccagcctgctgcgcctggacagcgccgcgctggacctggccgagttcgatatcggcgggcaaccgtcccacccattgcaattttttgtgttcggcccacgtgacctgtatcgccccggcgaaactgtgttgctcaacgcactgttgcgtgacaaggatggcaaggcggtgaagcctcagccagtgagcgtcgaagtgcggcgcccggatgaacaggtaagtcgcaagttcgtgtgggaggccgacgcgtcgggcctgtatcaatacccgttgcaactggctggcgaagcgccgaccgggcgttggcagttggtgttcgacctcggtgacggcaaaccgcaactctatgaattcctcgtcgaagacttcctgcccgagcgcctggcgctggaactcaagggcagtgacacggcgttgagcccggcggataacccggtcatccaggtcaacggccgttacctctacggcgcgcccgcatccggtaaccgcgtcagtggccaggtgtatgtgcgcccgctgcgtgaggcggtcaaatccctgccgggctaccagttcggttccgtcaccgaagaagagttgagccaggatttcgaactggacgaaagcgtactcgacgccaatggcgagcaagcgctgaccctggaaagcaagtgggccgaggccaagtcgccgctgcaattgatcgtgcaagccagcctgcaggagtccggcgggcggccgatcacccggcgcctggtgcagcctatctggccggccgagcaattgccgggcctgcgcgggttgtttgacggcaaggaaaccaacggcgatggcccggtggaattcgaagtgctggtggccaaccaggacggtcagaaactggccgcacaagacctcaaggtgcgcctggtgcgtgagcgccgcgactactactggaactactcggagaatgacggctggagctaccacttcaacgagaaattcctcaacctcgatgagcagggcctgaacatcaaggcgggcgacaccgccaaggtcagcttccaggtggagtggggcccttaccgtgtggaggttgaagacccgcacaccgggctggtcagcagcctgcgtttctgggccggctaccaagctcaggacaacaccgaaggcggcgccgtgcgccccgaccaggtcaagctggcgttggacaaacccgcctatggtgatggcgacaccgccaacgtcaccgtcacgccaccggcagccggtaaaggctacctgttggtggagtctgccgaagggccgctgtggtggcaggaaatcgacgtgccggccgaaggcaaaagctttgcggtgaagctcgacccgaaatggtcgcgccatgatctgtatgtgagcgccctggtcattcgccccggcgagcgcaaagccaacatcacgcctaaacgcgccgtgggcttgctgcacctgccactggatcgcacccagcgcaaactcggcctgaccctcaccgcgccagaaaaaatgcgccccaaacaaccactcacggtgaagatcgccgccaaaaacgccgatggcagtgtgcctcaacaggtgcacgtactgctggcggcggtggacgtgggcatcctcaatatcaccgaatacccaacgcccgatccctacgccagcctgttcggccgcaaagcctatggggtcgaccagttcgacatctatgggcaactgatcgaagccggccagggccgtctggccagcctggcatttggtggcgacgcggcgttggccaaaggcggcaagcgtccggacaccagcgtaaccatcgtcgccctgcaaagcgccccggtgaccttgaacgagaaaggcgagggcgaagtcagcgtcaatatccccgacttcaacggcgaactgcgcctgatggcccaagcctggagcgaggatcgctacggtatggccgaaggcaagaccgtgattgctgccccgctgattgccgaattgtcggcaccgcgctttctggcgggaggcgaccagaccaccttggccctggacctctccaacctgtcgggcaaggcccagaagctcgatgtgcaattgaccgcgcaaggtcagttgcagttggtcaacagcggcgcgcagtcggttgaactcaagcaaggccagcgcaccacgttgcgtattccggtacaagcctggggcgggctcggccagggcaaggtcacggtcaccgtcaacggcctggacttgccgggtgaaaacctgccgccgttcagccgcgaatggaccttgggcgtacgcccggcgtacccggccttgctcaagcattaccgtgccgtgctcaaggatcagccgtggagcttgccgtcgggtgcactggatcaattcgatgcatcgggacgtgaggcgttgttgagcctgtcgagccggccgccgttgaacctgggcgcgcagatcagtgcactcaaggcgtacccctacggttgcctggagcaaaccgccagtggcttgtacccatcgctgtacgccgacgacgcgctgctcaagcgcctgagcatcaagggcgagccggatgccgagcgcaagcgcaagatcgagttgggcatcgagcgcctgttgggcatgcagcgctacaacggcagcttcggtttgtggggcgccgatggcgaggaagaatattggctgactgcctatgtcactgacttcctgctgcgcgcccgcgaccagggttttgccgtcccgcctgaagccttgaagaaggccagcgagcgcctgttgcggtatgtgcaggaacgtaacctgatcgaggtggattacagcgacaacgctgaacacacccggtttgccgtgcaggcgtatgccggcatggtgttggcgcgcagtcagcaggcgccgttgggtgcgttgcgcagtctgttcgaacggcgcagcgatgcacgctccggcttgccgctggtgcagttggccattgccctgcagaaaatgggtgaccagccacgcgcggatcaggcgttggtggccggcttggcggcgcagcgcaatgccaatgagtggctggccgactacggcagcccgttgcgcgaccaggcgatgatcctggcgttgctggaggagaacgacttggccaagggccagcgcgaggagcgtttgttcaccctgtctgaccaattggcggccagcccgtacctgtctacccaggagcgtaattcgctgttcctggccgggcgcctcgggttcgccaagccggaaacgaactggcaagtgtcgctcaccggcagcggcggtgtgcgtgagttgaacaaccagcaatcgacgttgcaattggacggcgcactgctctccagcgacctggccttgagcaatcagggtgaagcgccggtgtaccaacaattgacggtttcgggttatccacaagtgccgccagcggccggtggcaacaacctgagtatccgccgcgaatacctgggcatgaacggccaaccgttgaacctgcgtaacctcaacagcggtgatctggtactggtgcacttggcggtcagcgccaagcaacgcgtaccggatgctctggtggttgacctgttgcctgccggcctggaactggaaaaccagaacctggcccaaagcgcggcgagccttgagaacgccagcagccaagtgaaagagtggcgtgagtcgatgcagaatgcctcgctcaagcaccaggagttcagggacgatcgctacgtggcagcgatgaatctggatggctatggcaccacgcacttgctgtacctggcgcgtgcggtgacaccgggaacttaccgcgtgccgccgccgcaggtggagtcgatgtatcggccgaactggcaggcagtgggtgagacgccagtggatatggtgatcaagggccgctgaaagccactgtaggagcgagcttgctcgcgaaaaactcacagacgccgcgttaatccaggaannnnnnnnnnnnnnnnnnnnnnnnnnnnnnnnnnnnnnnnaaacgtcaacgataacgcgggtttcctggattaacgcggcgtctgtgagtttttcgcgagcaagctcgctcctacagaggagaatcgagtggttgtaatgtcagtgtacgacccagctcagcaaccacagccccagcatcagccagatgatcccgacgataatcgaggcccgcataaaggcgcgtaccgccgagtaaaggaacagcaggccgacgatcagggtgatgatgctgatgatcgacgtgtccatgcccaaggtgcgtgacaaaccgtcgataaagttgccgccggcgtgggtcaaggccccgaacaaaccgctgaggccgtcgacgataaagcggatgacggaaccgagcgcctggcccaaccattcgaaaaagctttctacctgcatgtgcgtgtcctgatgagaaggtgggcgtaactgtgcctttggttgtcgataacgcaggcgagttccctgcaagcatagaggtttgcccgtttgagttttagtttaatcacctgcggatgtactcagtccaatgtgggagcgggcttgctcgcgaaggcggcgtgccggtgacatctctgccaactgacccaccgcgttcgcgagcaagcccgctcccacagttattgcgctgggcgttgggttgtgtggcgttggtaatactgctgctgtggggcgccgatcgcatttggcccttacccctgccccaggacgacctggcccgggtggtgctggccgaagatggcacacccctgtggcgatttgccgatgccaatggcgtatggcgctatccggtacacactagcgaagtttcgccttattacctcgacgcgctgctcacctatgaagaccgttggttctaccagcaccccggcgtaaacccgttggcgctggtgcgtgcgacctggcaaaacctgagcggcgcgcgcgtggtctccggcggcagcaccttgtcgatgcaagtggcgcgcctgctcgacccgcactcacgcaccctgcacggcaagttacgccagctgtggcgtaccgcgcagttggagtggcacctgtccaaggacgaaatcctcaacctgtacctgaaccgcgcgcctttcggcggcacgctgcagggcgtggcggcggcgagctgggcctacctgggcaagtcgccgtcacagctgacccacgccgaagccgctttgctcgcggtgttgccgcaggcgccaagccgtttgcgcccggaccgtcatccgcagcgcgcccaggaggcccgcgacaaagtgctgcgccgcttggccgagtttcaggtatggccgcaatcggcggttgatgaagcgctggaagagcccctgttgctcgccccacgtctggagccaagcctggcgcccttgctggcacgccgcctgaaccgccccgacagcccgccgctgatccgcaccaccctggatgccactctgcaacgtcgtctcgaagacctgctgctgggctggcgcgcgcgcctgccggagcacacctcggcggccatcctggtggtggaagaagaaagcatggcggtacgtgcctacctggggtcggtggatatcaacgacaccaagcgctttggccatgtggacatgatcagcgcgctgcgctcgcccggttccaccttgaaaccttttctctacggcatggcgttggatgacggcctgatccactccgaatcgctgttacaggacgtgcctcgacgttatggcgattaccgcccaggcaacttttccatgggctttaccggggcggtgccggcgagcacggcgttgtccagctcgttgaacctgccggcggtgcaattgctggaagcctacgggcccaagcgctttgccgcacagatgcgcatcggtggcatgccgttggcgttgccggcgttggccgagccgaacctggcgctgatcctcggcggcgcgggcagtcgcctggaagatctggtgagcggctacagcgccctggcccgcgatggcaagagcgccaccctgcggttacagccggacgatacgctcagggagcggccgttgctgtcgcccggcgccgcatggattgtgcggcgcatcctcagcggccaggcgcggcccgaccgcgacccgcgtgccgagcttgtccaacgcccggtgctggcgtggaaaaccggtaccagctatggcttccgtgatgcctgggcgattggcgtgggcccgcgttatctgatcggcgtctggatcggccggcccgatggcacgccggtaccggggcagttcggcctggcgtcggcagcgccgttgatgttgcaggtgcatgacgtgctgaccaaccgcgacagccagcgcggcatcagtgcgccggtcaaaccggtgccggccaatatcggcgtggcggcgatctgttggccgttgggccagcccatgaaccgcagcgaccccaactgccgccgccagcgttttgcctggaccctggacaacacaacgccgccgaccttgcaggcattggatcaacccttgagcgtgggcttgatggaaagtatctgggttaacgccaaaggcttgcgggtcgatgcccgttgccctggcgcaaccccccaaaacatcgccctgtggccggcgccgttggagccctggttgccaagaattgaacgccgtgaagcacgtatcccggcggctgacccggactgcccgccaccggcgctggccgcgtcatcgccgttgtccatcgtgggggtacgcgagggcgatcaattgcgtctgcccgctgccagtcaacaagccttgcgcctgaaaatctccgctctgggcggcagtggtcggcgttggtggtttctcaatggcgcgccgttgggcgacagcgccagtcaggacagcatcaatgccagttttgaacggctgggccgctatcagctcagtgtattggatgaagccggtcaaaccgccaggctcgaattcagcgttgtcgactgatcgctgatcgttcccacgctctgcgtgggaacgccgcctgggacgctccgcgtcccgacatccacgcaggcgacgcgaagcgtgggaatgatcgggtaagctatacccattcaggagcccccgcatgaacctcgaacacctcaccgaacgcctgcaccgcatccgcgatactaatgactggaagcagtttcacagcccgaaaaacctggccatggctgccagcgtggaaatggccgagctggtggaaatcttccaatggctcaccgaagaccaatcccgccaactgcccgccgataaactcgcgcatgcgggccaggaggtcggtgatatcgttctgtacctgctgttgctgtgcagtgagctgggcctggatatgaacgaagtggtgcgcgccaaactggccgatagcgaacggcggtttgcccatgagtgatcgtcatttcgaccagttggccacgcgctttgccgaaaagatctacggcggcgccaagggcgcgattcgcttggcggtgctccaggccgacctggtagaagccttgccgcaacgcccattgcgcgtgctggatatcggtgctggcctggggcatatgtcgctgtggctggccgagcagggccacgaggtgaccctggccgaacccgctgcaccgatgcttgaaggggcgcgccagcgcttcgctgacgcgggccaaagcgcgacttttattcatgcaccgtggcaagacttgctcggccaactcaccgagccttacgatctggtgctgtgccatgccgtgctggagtggttggccgagccccacgccatcctgccagtgctgcaccaactgacgctgccgggtggctggttgtccctggcgttctacaaccgtgatgcgttgatctatcgcaacctgctcaaaggccactttcgcaaaatgcgcaagaacgacatggccggcgaaaagcagagcctgacgccgcaacaacccctggacccacgggaattggcggcgcaacttgaagggttgtggcaggtcgaaagccaaagtggcgtacgggtgttccacgactatatgccggtggaattccaggcgcgcgccaacctgcaggacttgttggagatggaactcgctcaccgtcgtcacccaagctttgccgggcttgggcgatatttgcactggatctgccgcccggtttaagcggccagcgtgggaggtcgacatgcgtcgtctcggtttaattctgttgtctctaggccttggggcgtgctcgagccccaacccttacgtggccagttcggcgccgatgccgccggcgcccgcccaggcggcaaccacctttgatgccagcgcctaccctgcgccggtacgcgactacggcgcctaccgcagttggggctggctcaacggccagttgccggcgggcacggcctgggccgattcggcgcagattgccgaggcggtcagcggcgctctcgaccagcgcggcttgcgccccttgcatgacaagcgcgcgcccgacctgctggtgagcgccgatgtacgcctggaaaaacgcctgcgccaggtccaggacgattatggttacggatacggcggctataaccgttatggcaacggctatggcatgtacaacagcgtgccggtggtgcgtacctatgaagtgacagtggccgtggcgcgtatcagcctgttcgatgcgcgcacccgccagccggtgtggagcaccagcgccgaaaccaccagccagggcagcctgagcgaacgcgccgatagcttgcgcaaggcgatgcagaaggcaatggctgcctatccgcccagttagcagctattctcattacaggcccacgttgtttttggagaacaccatgcttcgtcgcatcgctgcacttgctgttgtcatgttgctgggcggttgccagagcaaccaggtcaaccatgatttcgacgccagccgagacttcggcgcttaccgcaattgggcctggaaagacccggcgttgcagtaccgtcccgatgacccgcggatcaagagcgacctcaccgagcaacgcatccgccaggccgtgggcgaacagctggatcaacgcggtttgcgtcctgcggcggcgggcaccaaggctgacttgaatgtacaggcctacctgatcgtcgaagaccgccagcagcaagtcaccaccaactatggcggtgcctggggcggcccgtggaatggttactggggcgcgccgatgtacaacgaaacgcgcaacatcacctacaaagtggcgaccatccagctcgacctgctcgacggcaaggacggcaagctggtgtggcgcggcagcgacgaacaaatgatggccagcacgcccaaccccgaggaccgtaacaaggccatccgcagcaccgtaaccaagatcctttccaactacccgccgcgctgatcaccccctgtcactcctgtgggagcgggcttgctcgcgacttcagtgactgacacaccgctttcgcaggcaagccagctcccacatttgatcttcagtgttttgagcatagcgttcgcttagctgagttgtattagggtgccgacattcagggcatctccgccagtcgccaatgtggcgagttgccagcaacctgccgaagccttgtctacactccagtgcaacggagagttagcgcaggagtgcttcgatgtctccccgattcggctccaggcagcgtggtgcaattggcttgatggcggcaggcaccttggccttggctctggtgtttacgttgctggcggtcgacagcgggcgcttgtacctggaaaagcgcaagttgcagtccgttgccgacacctcggcgttggaggcggcaggtctgggtggccagtgcggtaccaacaccacggccagcgcctatgccacgcaaaatgcggcgcgcaacggttttgtggtcggtaatggcaacaccctggcggtgacgtgcggcaccctggcgaccaatgccctcaacacccgcgtatttagcgccgatgccaccaagagcgacgcgatccgcgtggtggcctcgcgcaccgtcctgaccagcatcgccaatggcctgtggaacctgttcagcggcgcgccgatcaccccgcaaatcaacttgagcgccacggccgtcgcggcgacaccgccgcccgtggcgcagctgtcgatccgcagcagcctggccagcgtcgattcaggcaaatccccactgctcaacctggtcatcggcaacctgctcggcggcaacctgtcgctcacggcggcgggttggaacggcttgctgcagaccaacgtcaacctgctcagttacctggaccaactggcgatcaacctgaacgtgaaggccggtgactacgatgccttgctcagtaccgcagtctccgcgactcaactgattgacgctgcggtgaaggtcttgcagaaaaacggcgcggcagccacggcggtcatcaatgatgtgatttcgattcaagccattgcgccgaacagcaagctgttaaccgtgggcgacctgatcgacatcgccacaggcacgccgacggcggcgctgaacagcaatgtgcagttgtttcaactgctggaagcggtggcgcagttgtccagtagtaagaatgcggtgagtgcggcggcgcaggtcgcgattccgttggtgggcaatgtgtcgatccagaccaaggtcatcgaaccgccgcagttgtcggcgattggcaatcctgtattggccaagaagggcttgcagaataccccgccaaccgaacagatttttgtacgcaccgcgcaagtgcgcacgttggtgaccgtgcaggcgccgatcatcaaggcggtctctggcgtggcgtccatactgacgggcttgggcacgccggtgtcccaggtggtcaaagggttgttgaacctcaacctgccggcggtggttggcggggtgttgtgcctggtggcctgcaatgtggctgacgtcgatgtcacgacgtcgctggccatttacattgaagccggcagtgcgcaaaccaatgtcacggatttcaattgcgactcgccggcctctaaatccttgacggtgaaaaccaccacgtccctggcgaccctggcggtcggtacggtggatccggtggcggctttttcttcctcggctgcagtcaatgtgcagccggtgaggttgattgattttggcgagcgctactgtgtcgttctaacgctgctgtgcagtcccaaccgtacaccgaatgtggggggcggtttgctgttgaaagccaactccaccattgccgggcaaagcagcacgatggtgtttgcgccggtggccgagatgaatgcgccgcccacctacaagtttgcgccgggcacggccaatatcgtcggcagcctggtgtcgacgcttaatggcttgcaggtgacttacgcaccgcctagcggcactgtctccaatggtgcgttggctggggtcgccgggttgttggcgactatcactacggcggtggtggggctgatccagaatgtgttgtcgccgattctcgaccccatcgttaataccttgctgagtgccttgggcatcaacctgggcaatgccgaagtcggtgccaaccttacttgccatatgggtcgggcttatctggtgatttagctgacctttcgagttccaaatgtgggagctggcttgcctgcgatggcggcccgccagccgacacttctctagctgacaccctaagatccaactgtgggagcgggcttgctcgcgaaggcggcctggcagtcaacacagttnnnnnnnnnnnnnnnnnnnnnnnnnnnnnnnnnnnnnnnntttaggtaacggccacttagggttccgccctgacggcggctcactttgcaaaagcggcaaagtaagcaaaacgctcttgccccaccactcggcacctcgcccaggctcggtgtgcccgtaatccgccagtgatttggggggccgccgccacgcgccatccatggcgcggggcggctaaaccggcatccctgccggtttgccccccaaatccctggcgaattccggccagcgtggtttgacggggcgcttaagatcaagatcaaaagcagatcaagagcagatcaagagcagctcgcttcgcatcgtggttagcgttgaattagttctgcgcgatggggagttcgatgcagaatttcgcgccggcctcgccgttggtaacgctcaggcgaccgcccatgttttccacaattccatagctcaccgagaggcccagcccggtacctacgcctatcggcttggtggtaaagaacggctcgaaaatccgctccagcaagcgcgggtctatcccgccggcgttgtcttcgacccagatgcgtacatggcggctgtcgtgctcgctgtgcagggcaatccaggggcgcagggcggggtctttttctcgctggctgagcagggcgtcgcgggcgttgaccatcaggttgatcagtacttgttctagttggtcgacatagcctttgacctgtaccgagaagtcggtagggctgatgcgcacgtccacgcctttgccgcgcaggccttcgctgagcagggagagggtgccctccagtgcctgcgcggggtcgaagggttgctgctcgatttccgagcggcggccgaagacgcgcatgtggtcgaccactcgtgcggcgcgttgtacctgggcgtcgatgcgttgcagtttttccgtgaggtagtcgatttgcacatcgccattgcccaggcgcttgagcacattggcgatggccatgcgcatcacgttcagcggctggttgatctcatgggccaggccggtggccatttcgccgagggtagccatttttgcgctttgggtcagttgttgctgggagcggcgcacttcggtgttgtcgcggcccacggcttgcacttcgatcagggcgccttgttcatcgaagacgccgcggtccgaccacacccaccaggcatgttcgcgccccggcagttgcaggctgatttccgcggtgctcaccgggaattccggggtcagttgctggatgcgctgcacaaaggcggcgcgttgttcatccgacagccactggcccaggttgatgcctggcaattgttcgggccggcattccaggtaattggccagcggcgtgttgccgaaggtgaggatcaggtcggggcggtagcggcagatcatcgcgggtgagtcttccaccaggatgcggtagcgctcctcgctctggcgcacctgctcggcggccagggtcgcctcggtgacgtccagccacaggcctacggcttccaccggcaggccgaggtcgtcgcgcagcagcttggcttcgtcgagcagccaatggtagttgccttgtttgtcgcgcaggcggtagcggctgcgcacgttgccttcgcgcagcagttggcgggtgcgttcgaagtagtgttcacggtcgtcggggtggatcagcgctgccagggtgtcgtggttgcaatcggccaaggtccagcccagcagcggcaacaggctggcgctgaaaaacgccgggtgcagcgcgccgttgacgtagcgctgcacgtagatgacggccggtgagctggcgatcaggttgtccaggcgcgcatgggcggcggcggcttgcagttgctggttctggatgtcgctgatgtcgagcatgaagccgatccagcgtcgttcattgccggcgcccagtacttggccctgtatgcggtaccacaggggcgactgttcagcgtcggtgcgttgcaagcgcacgctggtaagcagtggcttgcccagggcttgcaggtcttgcaggcggctgttgagggcctggcggtcggcggggtggatgagttcgagccaagtgccgaggggctggcgggtggggccttcgtccaggctcaggttgcgcaatagttgcggcgccagctggatctcctgggtagcgggcaacagttcccaccagccagtgccgagcaggccttgcagggcttctacccgttccagttgctggtggtgacgctgttcgcgcaggcggcccagcagcggcgcggcgagtgctgcgcacaggttcagccagtcacgctcgccggtgtggtatgcctggccgttatagaaaccacacagcagccacgcggcggcgccatggctgtcgcggtacggcaccaggaaaccgtcggcattgccaaatacactgtgcaagcgcgggttgtcgctgcggccctgggcaacgtccaggctcagtggcgtgttgccgttgatgctgtccaggctggtgcccaggtgctgcccggtttgccataaggccggggcgtcgtgggcggtgtattggctgtagatgcgccagccctggtcatcttcgtcgagcagtgccatggcgacgcaggggatgcgccagcgctgggccacgctgcgcaggtgttcgctgaacacctgaggcaagcggttgaggctgcacacgcgcagctgttcgctcatcagggcggcgagttggtggttctgttcgcgttgctgcacccgtgcccggtcagccagcaggtcagtgatgtccagcaggtgcagggcccaggcgtcgccctccggctcgatccagccgcgggtatgcaggacctggccggcggcgccctggaagtctagatccaggccgtgtcgttgccactgctgcggcgtgccctcgacactcagcgcgctgtcggcacacagcaaggtctgcaagggtgggttgggcgcattggcaagatgctgggcaagcaaaggcctcaaggcgcccgtgatgctcagcacccggcccaggttgtccagttgcacttgcaggcccggcgcgggcgtcgttggcgcgtccagagccagggcgctggtaagcccgcgcaggcgtgcgaacaatttatcccctgtcgtcaaaactgaaggctcgaggtggcggtgaggttggtgggcaggttgggtacggtacccaccccaggcaacaccagggccggcaagaccgctttgatattggccgaggggtaggtgatcttcaccgtcagcaaattattggtgtaggtggcggtgatatagccgggcaagaacttcaatgagccggggatccagttcaactgggcctgggctgcatccttggcgcgttgcacaaccagggccgaatagccggcggtgctggggtccagggacacactgcggcgtaccccttcggcggccgcttggtgaaatgactgcatcaacagcagcggcaagctgtagctgagcatgccgtagaacaccgcaaagaaaatcacgaagaccaaggcaaactcgatcgccgcagcacctttttgctttctcgggaggctcgatttcatgactgcgtctaccctgaggcgagtacttgatatcagcatagaatcattcagccaaaagggatgttttttacgtgatccagacgctagtgattgtgctgtggttgggcgtatgtgccgtgcaggatattcgccagcgccaaattgccaatacgctgaccctgggcgtcgggctgttggcgttgatctacctgctgtgggcggggtcgacgtggctgggcgcgccccgcagcgagggcggcctggccctggctttggcgctggtgctgaccttgccgggctatgcgttgggccgctttggcgcaggggatgtgaagttgctcgccgccctggggctggcctccaatatcgagtacctgctggggtcgctgatcggtgcgggcatcgctatggtggcctggacacttatgcatcaagggcttagctcaaaccgcgttaagcgggcagggcccgcgtcaacaaaacagccttttgcgcccttcgttttgacaggttttgccggcagctggttttggatccatcagtcgcgcgagttgattaatgctatgtacatagtcggaaagtacgtctacgtttaatcaggagttgtgtaggaattttcgtcagaaaggataggtcatcatttggcttgccaggcatggagtagcgcgtgaacaagcttacgtccgcagtaaaagtgctcgtagtcgacgatcaacccttaatcgtagaggagctctgtgaatttcttgaaagcagcgggtaccgttgtgtcccgtgtgagtccagtgagcaagctgtccagcgtttcaaggaagaccttcagatcggtttggtgctgtgtgacctgcatatgccggacatggacggcatcgagctggtgcaggcgctgcaacggatcgccggcaagcatcgcgcgttcgaagcgatcatgcttaccggtcgcgccgacaagcaggatgtgatcaaggccctgcgtgcaggtatcgccgattactaccagaagccgatcaacctcgatgaattgctcgagggcctcaagcgccaggaagcggcattggaggagcggcagaaagacctgcagttgggcacgctcaaccagaagttgcagtacctgtccgaatccatcaacgacttgtatatggacttggacaaggtgcgccgcaacccgacgccccaggaccatgacggggacccatcggccgatgaagccgggccggtggagatcccggcgatcttcaatcaactgtcaccgcgccaattggatgtggcccgcctggtgggcaaggggcagaccaactatcagattgcctgtgagctggggatcaccgagaacacggtcaagctgtatgtgtcccaggtattgcgcctgacccatatgcacaaccgcacgcagttggcgctggcgttgtcaccgaacaactcggcgatgcgccagcgggtgacggcgcactagcaccgccctactgtaggagcgagcttgctcgcgaaaaacacctagacaacgcggttacccaagatgcacgcgttatcgttgacgtttttcgcgagcaagctcgctcctacagggaggggttatttgctgccctgcgcagtgccgcctactttctgatcaaaaaactccggaatcgggtgcttgttgctgtccagccagcgcttgagcgcctgctcgcgttctgccggcgtggttttttgcggattggccgaggcggcgcgcccgctcagttgcagcgccatccagttttccgtttctgcctgccggggtgaagacggccccgcttcgatggccgaagcgaggaggggcagggccaggcaggcaaggccggcgaggtggtggaatttcatcattgactccctatttcacagaggccggcagcgtgtcgctgaccgccgctacctgatccttgactggacgctgcggtgccgtgccagcgtccttgaggtgttgcgcgcgtgcctgggcccgggtcacctgatcggggctcaagccgagttggccgaccactttcgcggcttgctcccagttgtcttggtagatcagcaaagtcaccaggttcaccgccgccagttgatcgctctgcttgagctcgatggcggtcatgaattcaaagcgtgcgtcttccaggcgccgttggtcgaggtagaccacgcccaggtcattgcggattttttcgtcggtgggcgccagccgtgccgcacgttgcaggtgagccatggcctggccgttgtcgcccttggccgacgcaagttgccccaggccgtgctcaccgtcggcggccaggcaggtgcccagcaggctgcggtacaacggctcggcgtctgggcggccgagcaagcgataggcgcgggcttggcgttgacgaacctggggcagggcgctgggcaggttctgcaggttggcgaggctggcgtgcagtttgccttcgttggccatgtcatcggccaggttcaacgacagctcctggtcggcgctgggcttggggcaactgcccggtgccagcaacccggcccacggaacctggccattgctggcacaaccgcccagcatcagcaggctcaaggcgacgatcagtggtttcatggcaggctcctcaaaagttattcaaggctcgggagatggcgatcatcgccggccccccaagcacgatcagcaaggcgggaaacagaaacaccatcatcaccacggacatcttcgcggacatcttcgagatgtattcctgcaggcgggtcaggcggcggtcgtcgagcaactgcttgagggccagcaaggatttcatcgcgccgccgccctggtggatcaactgctgaaggatgatgcaggtgtcggtgaattcatccacggccagcaggcgtgcggtcttgcccaactcttcggacagctccaggccggagtcgacccttaccaggatcaggcgcagttcatgggtcagatcggggagcaagcgctgggcttcggtgctcaacacccgcagcgattgttcaactgccatgccggattcgaacaggatgcgcagtaacggaatgaacgtggaaatttcccgcgcgatacgctcctggcggtatttcgcgctgagggccaggatgcgcttgggcagcaggtaaccgatgcccagggcaattgccggggcaatccagggcgagccggcgtgaggaaacagcagttgctggccgagcagggtcaagcccagcagcacgatgggcacgccgatctggaaggcggcgaacatggagcgctggttggctttgcgccagccgacgcggttgagcagggtctgggtttcgttgtccaggctgaccgagcgctgggccacggcgctggcgcccaattggcgcatcaggctgccgagtttgtcctcgcgggtcagttggccttgcaggcgttggctgaccaggcgttgacggcgccgttgctccagcaggttgccgacgatcaaggcgacggcggcgagcgacaacaggatgcagatcaggatggccatctcaaatactccgcaacatgcgccacatgacgaaggtgcccgtgatgtcgagcgccgccgcggccagcagcaggtagcgcccggttccgtcattccacatgctcatcaggtagcccgggttgaccatcaaaaagtagccgaccatggcgatgggcaagcctgccaagacgtacgcggtcatgcgcgtttcgcccgtcatggccttgagttggcgtgcaccctgttcgcgctcgcggatcatcttgatcaggttttccagcagctcgctggcgttgccgccgtagcggtggttgaccttcaggcccagggcaaacaggcggaactcatcgcgctcgtaaaactcggcaaagtcgctgaccgactccggcaggctcacgcccatttgcacgttacgctggatgcggctcatggcctgtttgagcggcgcttcggtgctgtcgatcgcacccagcacggcgtctgccagggtgcgcccggacttgaggctgcgcacgctgtggtccagtagttggggtaattgttcgatcatgcgctgcactcgccgttggtagcgccaggcgataaacacacgcagcagcagcggcggcatgatcagcatcaccaacaggcccagcccgccggccagcaagtaacccagcaacatgcccaccgcccaggtactcagccacaaccccaggcgatcggtgggcttgcccaggccggcgcgctggaacatgcgctccagcgcgacccagctgccgttcggctcctgggctaccggctggccatcggagaggcgctccaacacccgatcggtaccggcctggcgcagccctcgctggaacagccagacggacaggctgatcagcaggatacaaatgagcagcaagacaagtccggtcatgagccctctctacaacggcaatgccgattcacgccgcagcttgtcgccggccgggttgagcgcttcgcgcaggaagccaaaaccggtacggcggtcgaggcggaacagggtgttggtgacatacacgtcgtcgcgcacgcccaccacttccaccacctcgctgacgcaacggcgcccatcgggcaggcgcgtcagttgaatcaccacatccagtgcagcgcagatcatctgccgcagggttttctccgccaccacacggccggtcaggcccaccagggtttccaggcgcagcagcgcgtcctgggcattgttggcgtgcacggtgctcatggaaccgtcatggccggtgttcatggcggtcatcacgtcgagcacttcgacgccacggatctcgccaaggatgatgcggtccgggcgcatccgcagggcgttgcggatcaggtcgctggccttgacctcgccatgcccctcggcattgggcgggcgggtttccaggcgcaccacatgggggtggcccagttgcaactcggccacgtcttcgatggtgaccaggcgttcgtgggggttgatcaattggctgaggatattgagcagcgtggtcttgccggtgccggtgccgccactgatgaggatattgcagcgtttgcccaccgcctcctggaagaactcgaagatgttgtggtcgatggtttgcatcgccaccaggtcgctgctcttgagcatgtccttgcgaaacttacggatcgacaggcaggggccgtccagggcaattggcgggatgatcgcattgacccggctgccatcgggcaagcgcgcatcgaccatcggcgacgactcatccaggcgccttccgaggggcgcgagaatgcgctgcatcacacgttctacatggtgcgcatcgataaaacgcaggtcgctctggtggagcaccccgtcacgctcgataaacacccggtgcgggccgttgaccaggatctcggtgatcgacacatcgcgcagcagcacttccagcgggccgaagccggtcagctcatcgacgatttcctcagccagacgctccatctcataacgcgagatcgccaggtgcatgcgcgtgatgtactcggccactttgtcgatgacaaattgcgccagggattggcgcgagccttccagcaggttctggccggattcttcgatggcatcgatgatgtaacgatgcagcaccagtttcaggccatcgtggtcgttgtgcgcggctgccccacgggccggggcgccgaagagtttttcgctgttcatcgactcgtccccagcaggcgttcgaaccagcgtgtcgaaggtttatccaagccttcggtgcgtttggccaggcgctcgcccaggtggcgcagggcttgggtcaaagcttcgcgtggggccagggtgaacaggctttgcccctggtttttggcgttcaggcgcacttcggggctcaggggcagcacggcgatgcactccaggccgaagcttttttccagggcttcggtgtcgggggcacagcctttgatgtagcgatcgacgagcagcttggcatggtcgagcttcatgcctttttcgcgccacaggttcagcaccgccaggttacgccgacagtcgagcacgccctggtcggtgcaccacagcaacttgtcgcagtggctgacaaaggtacgcagggcttcgctgtccgcttgcccggtgaggttgaccacgatgtgctggaagtgctggcgcaaggcgctgagcaacatgtacagctcggcggcgctggttatttccaggggctcatcgctggcggcgtaggcaaggatccgcaggccgtcgtcggtgctggtgaaggcgctgttgatgagcgtggcgtccaggcggcgcaggtggcgcaaggcgtcgccgaaattgaaggtgctgtccaggcccagcagcgccaggctgtcgcccctgggcaggccgaggtcgagcatcagcgtctgctggccgcttttttgcaccaccatcgccaagtggcttgccagcaaggcgccatcggtgttgccctgggcaccgtagagcacggtgaggccgccgaggtgggcgttcggcgcggtgggcggcaagcgcttgctcaggcgccgcaccagcccggccacttcgctggagcgcgagccataggcgacaaaatcccgggcgccggcacgcatggcattcaagacaagctggttgtccatgccgtcgcccaaggccactactgccaacatcggcttggcttccagggcgccttcgatcaaggcactctgggccaccaggtgttcacggtccaggcctacgaacaccaggttggcgaaggtcacgtccaccagtgccagcaattcatcgaggctgccgccgcccacgctgatcacttggccaaggggcgccagcgcgccctggagccattccaggtcggtgctgttgcgggtgattgccaggaaggtctggctcaggctatcgctcattgggaaagtccactgcgacggtcgaagttgccgttttccaggaagaacaggcggaaccaattcgggtcgtaggtgcgcagtttctcgccgggcagcgacggcaactgcgcattggcggccagtggctgtaccagatgcggcgtgacgatcatcagcagttctttttcttcgctgtttatagtggagtcgcggaagaaagcaccaatgatcgggatgtcgcccaggcctggcagcttggcgatcgtggagcggttggtgctgctgatcaggccgctgatcacgaagctttcaccgtcggctaacgacacgctggtgtcggtgcgccggacggtcagggcgggtacctggatgccctggatccggatcgcgttgttgtaatccagctcgctgacttccggggcgactttcaaggcgatgcggttgtggtcgatgaccgtcggcgtcagcgtcaggcgaatgccgaattccttgtactcgatggtgatggtatcgctgccggcactgggcaccggaattggcacttcgccgccggccaggaaggtcgcgctctggccgctcatggccaccaggctcgggcgtgccagggtataggcgaagccgctgctttccagggcgttgatcagtgccttgactcggccaccgccaaacccgatgttgaagttttcggcgttcaccggcaatttgaagatgccctctgaaggggacagcaagctcgggctgccgaggaagaaattgttgcccatgccgaggatcttggtgctggcctccttgagcttggttcggctgacttcgacgaagcggatatcggtctgcacctggctgggcagcgtcgggtcttcggagggcgacagcgattggctggtcagcgccgaggtggccttgcctttgacgaacaccatgctctggcgcggggtggtcgagcagcctgtccacaccatcaggctggtggcaccgctgccgacaccggtgagcagaaagtggcggtcgccgttgacccgcacgtcggcgattttcggatcgccgatagccaggcgcgtaatcgctaccggcgattgcagctcggtctgcaagccttcgcccacctcgatcgcagcgggcagttggcccagggtgttgcagttgcccgatgcgcccatcgccatgcccaggggcaggcacggcagcatcaaggccaaggccaattgagcgtagcgttggctcattcaaggcatccttgttcaatcagggggtaggttgtgccgccgccgcgccgcgaatcacttcgacgccccgacgctggccggtgtcggccaccgcgggggtgattttttttggcgggccgctgagggccaattgggtgaattggtagaggtcgcggttggcgctttgcaccttgtccggggtgtcgctttcgccggcccagtagcggctgagcagttgttcgtcggcactgcgcacggccaggcgcagcgtgccggcttgggaggcgagcatcagccggctcagcaagggttcgggcaccgccagcaccacactgcgcgcggcagtgcggcgttgggcagcctgggcgcgttcttcggcggtggcgggtggcggtacggccggggtgccgtcgttggccaagcccaactgatcaccgacgctgagcaggcgaattgccgggatgaccacctgcgccgactgctcggcattggcattgtcctggcgcaagaacagcaagacatccacgtaatcgccggggctcaactggccaccggcaccgatgacctcatcgacggcgacggccagcgctcgttcgtttgtacgaatcatgcgggccagggggccgccggcggtgaagctctcatcattgagccaggtgccggcacccagggcccgcaagggcgtgcggccgatggcctggtcaacgctggtcaggctgccagccggcacggtgcgcagtttttccacggcgacatcggcagccgtgaggggcacaaaaggcgcaaccgcatgcaccagcaccacgaccggctggcgggtttggtcttccacgacggcaacggttttttcaacggaaatgacaggttctggcgagggcgctacggagggtgccggtggacgactcagcaccaggccccaataccctgcaaccagggctccgataagcagcaagccagccaggaccatgctgatacgactgttcatgacggcgctccctatcctgttgcactgcttttattcccgtttatccaaacgagctaaattcgcaactgggctgtgatgaacaactaacgatttggctatttgaaggtagcccagctaggacaaattgccattactgaatgaaaaatttatctgcgcggttaaagcgagggctgtaaataacggatttgtggggctggcgcggcgactaatactttatgattaattcgttcttacagttgtgagtgttaaatttgttgacaatgctctagtggcacacggcaatcattgtgtgggccagctgtatcggcgctttgtggcgcatgagggagatctcctatgatccttgacctgttcttgaaattttacattcacgctcagttattcctgcgccgtagagacggggcgtcggccattgaatatgtgattattgtggcgatagttgcattaggtatcatcagctttggtggtgggcttggcgataaaataaaagccatttttcagcaagtgtctgatgcgctgccagccgcgtaatagtcattgctacaggttattgttccggtaattattttatcaggtaccgcccatgacccacctttcgtcatcccgccaacaaatcctattggtggatgacgaggaggatgcgctggtcgagttggccgaatccctcgaaaacgagggattcgtctgttttaccgcgacctccgtcaccttcgctttgcaagaattgacacttaaccccgatatcgccctggtcatcaccgatctgcgcatgcctgaggaaagcggtatctccttgatcaagcgcctgcgcgaacatacctcacgctcgcatttgcctgtgatcgtgatgtctggccatgcagaaatggacgatgtcagcgatatgctgcgtttgcaggtgctggatctgtttcgcaagcctatctacctggtgcgcttgctcgataccctcaacaacctgtttcccctctctaaacctggtcggtaacggaccggcaccgcttattaaatgtgggagctggcttgcctgcgatagcggtggttcagttaaagattcattgactgacacaccgccttcgcgagcaagcccgctcccacataagctccctcgcaacagcttcacagttgataactgaaactcagcgtataccgcggtctgcggttgaagctgtccagggcgatatccgacattggtttggccgcctccagcgcgatgttgtagtacttcttgtcgccaaagcgtagacccaccgccgccgaggacatgtcgttggccttgactggcaggtcgttgaaccaggatttggcgcggtcgactacgacgtagggttgcaggatcttcacccagttgccggtgcggttgaagctgtagttgacctcgtacgccaccccccagcctttgtcgcccgagccttggtcgtccgggtagccacggccgaaattctgcccgccgaaggtcacgcgttcgctgtcgggcagggtgttgtcgctccagtacagcgcaccggagagcacgccttgccagttgtcgaagaacttgtcgctttgcacgccggaaaggcgcaggcggaagaagtcgaggtcgggtttggccacgcccaggtcactgcgggccttggcgcccagaccgtcgatgccctggtacaggccaccactgatgatgcgcaggcgttgcgcgtcggctttgcgccaatcgccttcgaaggccagggcgcgcaggttggattcgatgtcgaaacgcagcgggtagcccaccagtttatagcgcgtggtctggtcgaccgcgtacaggcgcgtgcccagggtgagcgactcggtgggggaggcgatgaacggatggctcaggccaatggagtagcggtcgatggactggtgcggcttgagttcgaaaccgccatccagttgcacgctgctgttggggtcggcgcgatagcgttcggcggcgagcgccagttgggtgccctcggcgttgatgaactggttgtagtccacacggtagtagtgttctttgtcctcgccgggtgggaaaaggccgctgacgctgagctgctcgcccatggacgtctgggaattgctggtggcgctcagcaacgcttgcgtgccgccacggcttttttgcaccaggctcatgctggtggtgaaaggtttgcggctggcctggatctgcatgtgcgtggcgccatcagtggtgcccggtggcggtacttgcgcctgtacgctgaggccggggatgcggctcatcagcgtggtgtagcgctcgaaagtcttgcgggtcagcgggcgctcagccaggagcttctgcgcgagtttatcgacgtaggccgacaccgaaccgatgtcgccggtttgttgatagtccttgatgtagccctccaccagtaccacgcggaccaggccgttttcgaaattctgttgcggcaggaacgcgtaggacagcaggtagccatcctcctggtaacggcgggtgatcccacgggtcgcttcaatcagttgggcgaggttggtttctcgtccaatcaacggcgcatacacctgtgccgtctcggcgagcgggtagaccgttccgccttcgatctgcaactttcgaatagtgaccttggtgtccatcaacagcggttggccggcagtcggcggcgcttcaggtacctgggttttcgacgtgggtggtcggtaggcatcagcgggcaggttgggcaccggcagggtgcggacagtgtcgttgctgttaagaaagctgggaagggtctcggcctgggcgtaggcactgagggtgagcaataacaacggcgtcaacacgcgcataggacactccatggtcaactgcagcagcgcttcgggcccgccgggttctgggactcggttcgggagggcggcgattgataaaacgtgtcgccgcccataaaaaagacgagagacttattaaaggtctctcgtctcaaccaagcgtaggcgctgtaggggaggccgtctaatcggccaggtgcatttctatttgccggtcaggccgttcaacaaaccgcccagaccgcctgtggctgtagtgccgcctgtggttgtggccgtgccggttgttgtggcggtagtgccgatattcaggccgccgagcaagccaccgctggtgccgccagtggtgccgccggttaccaggccacccaccgaggcgacggtgccgccgaccgctgtgacggtggtgcccaccgcgttggtgatcgggttggcattggctgctgtcaggttggtgcccaagctgctgactgcgccgccgacttgagtcaccaggccatcgaccggggtaccgataccggtggtggtacctacgttctgcgtcagcgtagtgacgccggtggtcacagggttcaaggctgcgccgacagcggtggatacagtggcgagcggtgcggtggcgccagtgttggcgacacccgtgccaccgagaacggtacccaccgatgcaatggtgccgcccaatgcgccgccggttacaccggctgcactgaccgtgccgttggtgctgccggcattcaaaccggtgcctacgttggctaccacgccgccgatcagctcgggtaggccggcagctgcggtaccgccggttggcgcgacataaccgccggacgtatcgagcgcaccaccgacgccagtcagcacgccgccaacgacattggtcacagggttgcttgcaccacccgcggtagtgacttgagtgcccaggctcgcgacggtggtgccaactttatccagcacaccactgactggcgtgcccaggccggttgccgtgccgaggttgccggtggtgttttccaccagcgacactacaggcaccaacacttggccgcccagggtgttggtcaatgaacccagcgggccggtggtgctggctgtgctgagggtatcgccgagcatggtcacggcggtaccgactttatccacgacgccacctactgccgtgcctacaccgcctgtgaggccgcccacgacagggacaccgccgagggttgtcgacaacgattggccggtagtcgacaggccgtcgcccaagtcagcgacgccgccgccgacaccagcaaccgtaatgcccagcgagttgctgttagtccccaaagaacccaagcctgctgtgacgccggtgccgacggtggtgaccgcggtgccgaccgaggtgaccaggccgcctgctgtggtgccgacgattggaacaggggtcagggcgcctccgagatcacccactgctgcgcctacattgcctacggtggtgccgagggtgccggcgatctgcccagtgatcagcggggtagtggtcgaacctgttccgccaccagtcccgccagtgccaccgccggttccgcccgtgccgccgccggtcccgcccgtgccaccgccggtcccgcccgtgccgccgccggtcccgcccgtgccaccgccggtcccgccagtgccaccgccggttccgcccgtgccaccgccagtgccgccgtccgttccgccagtgccaccgtcagtgccgccagtgccgccaccagtcccgcctgtgccgccgtcagtgccaccagtgccaccgccggttccgtccgtgccgccgcccgtgccgccgtcagtgccgccagtgccaccaccagtcccacccgtgccgccgcccgtaccgccatcaccgctcccggcgcctgcacccgcatccggcgatgacgccgccacgctggatttatgcccgccaccaccgctgctgcagccgcccaggctcattgccagaacgagggccagcgcggtacttgctttccaaaacacgacttgagttttcatgattgagttccttgcacctggtacaaccttggttgtttcaaaccctcgttatttctttggataacgataggtttgtccgtgtggctatctcaggccaaggcactctttcacgcaatgctcaacttggtattaacgatttatatacacccggccacagtcggcttaatgactaataccaaaggtgtaatggatggatgttgcaggatatttagatgattaaaatcaaagtgttgtaaataaaggcggacctcgtaaggtccgctataacttagggtgtatatatacaattaatcagagtttctcacgcaatcggctgccacttccccagcatatgttgtatatccccagcgcctttgagttccaacgccccgctggaaccggccgcgctgctcatcaatatcacttcactgggcaggcgcaccggcttcatgaactcgacgtcaatttcaatattggcggccggcaagtgttctgccagcgccgcgagggtgcgcgccttgttccacaacccgtgggcgatggcctggggaaaaccgaacagcttggcggttggcgcactgaggtggatggggttgtagtcgccggacacgcgggcgtagcggcggcctatgtcagtgggtgctttccagcgcgtcagttcggtgagcgtgccctgagtctgcaatccgctgtccgcagcttcgccttcaagcttcacgccccgacataacatctggctttcggcttcccacaggagcccaagggcatcctccacaacggtgacgatgtcaaaggtggcccccttgggatgggggctgagattgcgtgcgtaaacgccgacactcacgtcacccactccacctagaggccgatgaatacggatgcgattgcgcaggtggatcaaccccagcagtggaaacggaaacgtcttgtccgtcagcaattgcagttgcaggccgaacgcgaggatatgcggataagtcgccggcagcatcgggctgtcagcaaaaccgcacaccttgcggtacgccgcaacggcgccgggattgacattcatccggcagcgcaacgcacgttcgggcagtgtgctgccggtgatcttgcgcttgagcgccgcacgccaatacagcggcagtagaggtggggtgctgtccaaggtttgccattgcatgcttacgctcccagaagactttgcccacacacccgcagcgcctggccgctgaccgcaccggagcccggctggctcagccaggcgacggcttcggccacgtcctggggcaagccaccttggcccagggagctcatgcggcgcccggcctcgcgcagggcgaagggaatatgcgcggtcatctgggtttcgataaacccaggcgcgacggcgttaatgctgatcccacgttccttgagcagcggcgcccaggcttgagccaggccgatgagcccggccttgctcgcggcatagttggtttgcccacggttgccggcgatgccactgatggaggccagcaacaccacccgtgcgttgttttgcagggtgccgctgtcgagcagggccttggtcagcacttgcgcagccttgaggttgaccgccagcactgcgtcccagtattccggggtcatgttggccagggttttgtcgcgggtgatgccggcgttgtgcaccaggatgtcgagcccgtctggcaggtgttcgatcagttggcgtgcggcatcttcggcgcagatgtccagcaccaccgtgcgcgcattcaggcgtgcggccagggcttcgaggtcagccttggcctggggcacatcgagcagaatgacctcggcgccgtcgcgggccagggtttcggcgatggaggcaccgatgcctcgagcggcgccggtaaccaatgccttgcgcccggccagcgggcgcgtccagtcttgcaccggggtatcgcaagctgccaggcgaatgacctggcccgagatgtaagcgctcttgggcgagaggaaaaaccgcagcgcgccttccaactggtcttcagcgccgtcgcccacgtagagcaactgcagcacgccaccgctgcgcagctccttggccagggaacggctgaacccttccagggcgcgctgggcgctggcggcgaacggatcgctgaggctttccggcgcccggccaaggatcaccaagtgggcactgtggtcgaggtttttaagcagtggttggaagaattcgcgcagctgcttgagctggtcggcttgctgcaaactgctggcgtcgaacaccaccgccttgagcttggggccgtgccctggaatccacgcgggcgctatcgaggcttcggcgccgtagctgtagacggcgtcggtgagtcggttggcaaacgccagcacctgggttgccaatgcgccaccgcccagcagcagtgcgccttcgaccgggcgcaggcgtccggcttgccagcgttccaggcgtaccggtgacggcaggccaatggcggcgaccaggcgatggccgaggcttgagttggcgaagtcgatataacggtcagacatggaacgctctccgaaggctggggttcaaaggttgaccaccctggggtggcagtcgttcgattgagcctaggctaggcttgatgattccacccactaccacaagggagctttccatgactcaattgcgccgtgtagcgatcattggcggtaaccgcattcctttcgcccgttccaatggcccctacgccacggcgagtaaccaggcgatgctgaccgccgcgctggagggcctgatcgagcgctacaacctgcacggcctgcgcatgggcgaggtggccgccggcgcggtgctcaagcattcccgtgatttcaacctgacgcgtgaatgcgtgctcggctcgcgcctgtcaccgcaaacccctgcgtacgacatccagcaagcctgcggcacggggcttgaggcggcgctgctggtggccaataaaattgccctgggccagatcgaatgcggcattgccggcggggtggacaccacctcggacgcgccgattggtgtgaatgaagggctgcgcaagttgctgctcaaagccaaccgcagtaaatccatggcggacaaattaaaggttctgttacaacttcgtccccagcacctcaagccggagctgccgcgcaacggcgaaccgcgcacgggtttgtccatgggccagcactgcgagctgatggcccagacttggcagatcccccgcgccgagcaggaccaactggcgttggagagccatcagaagatggcggcggcctacgccgaaggctggcacaacgatttgcttacgccctttctcggcctcacccgcgacaacaacctacgccccgacctgaccctggaaaaactcgccagcctcaagccggccttcgagcgcagcgaaaagggcacgctcaccgcgggcaactccacaccgctgaccgatggtgcctctctggtgctgctgggcagcgaggcgtgggccaaggagcgtgggctaccaatcctggcttacctgcgtgatggcgaagcagcggcggtggattttgtccacggcgccgagggcctgttgatggcgccggtttatgcggtgccacgcttgctggcgcgcaacggcctgaccttgcaggactttgattactacgaaatccacgaagccttcgccgcccaagtgctgtgcacgctcaaggcctgggaagacgccgactattgcaagagccgcctgggcctggacgcgccgctggggtcgatcgaccgcagccggctcaacgtcaagggcagttccctggcggcggggcatccgtttgccgctaccggtgggcgtatcgtcgctaacctggctaaattattggatgcggcgggcaagggccgtgggctgatttccatttgtgccgccggtggtcaaggcgtgacggcgataatcgaacgctgattgccgataaaattggcccattgaatgcattcccaaggggtcagaggtcagtagcctctccccccggcgagccgattgccgtataacgagttccacacgcgtgtttggtaatacaggacccacaataaaagctgatgaagactcctaaacgcattgaacccctgatcgaagacggtctggtcgacgaagtgctgcgccctctgatgagtggtaaagaagcagctgtttatgtggtgcgctgcggcaatgaattgcgttgcgccaaggtttacaaggaggcgaataaacgaagttttcgtcaggcatccgaataccaggaaggccgtaaggtccgtaacagccgccaggcgcgagccatggccaagggctccaagttcggcaagaaagaaaccgaagatgcctggcagaacgctgaagtggcggcgctgttccgcctggccggtgcgggcgttcgcgtgcccaagccgtacgactttcttgaaggcgtgctgttgatggaactggtggccgacgaatacggcgatgcggcgccgcgtctgaatgacgtcgtgctggacccggaccaggcgcgcgaataccacgccttcctgatctcccagatcgtgctgatgctgtgcaccggcctggtgcacggtgacctgtccgagttcaacgtactgctcacgcctacgggcccggtgatcatcgacctgccccaggcggtggatgcggcgggcaacaaccacgccttcaacatgctggagcgcgacgtcggcaacatggcttcctacttcgggcgttttgccccggagttgaagaagaccaagtacgccaaggaaatgtgggcgctgtatgaagccggcaccttgcacccggccagtgtgttgaccggtgagttcgacgaaccggaagaactggcggatgtgggcggtgtgatccgcgaaatcgaagcggcgcggctggacgaagagcgtcgccaggcgattcgcgcagcggatgatgcgccaccgagcaaagtaccggacgagccaccgccaccgccttggatgcagtaacttacaacggcgcgtgccagctcccacattgatcgttcccacgctctgcgtgggaatgcatccctggacgctctgcgtcctaaagcgtgacgcggagcgtcgaaagcggcattcccacgcggagcgtgggaacgatcattgtgctgtctgtcaggcgcagcagttacccgctgctaattccttgaggatcgggcaatcgggccgatgatcgccctggcagtgctccatcaggtcctgcaaggtatcgcgcagttgccccagctcgcgaatcttgtgattgagctcgtcgatgtgctggcgcgccaaggcttttacgtcggcgctggctcgctggcggtcttcccacagggtcagcaacttgccgacttcttccagtgaaaaccccaggtcccgcgagcgcttgatgaacgtcagggtgtgcaggtcatcgtggccgtacacgcggtagccgctgtcggtgcggtgggcggttttcagcaggccaatggattcgtagtagcgaatcatcttcgcgcttagcccgctggtgcgggcggcttggccgatgttcatgggcgttgatcctccaagtccttgggtttccaggttttcaacaacagggcgttactcaccacgctgacgctggataaggccatggcggcgccagccagtaccgggttgagcaggccgaaggcggccaggggaatgccgatcaagttatacacaaaggcccagaacagattctgtcgaattttcgcgtaggtcttgcggctgatctccagggcggccggcaccaggcgcgggtcgccacgcatcaaggtaatgccggcggcgtgcatggctacgtcggtgccgccgcccatggcgatgccgatatcggcagcggccagggcgggcgcatcgttgataccgtcgccgaccatggccaccacgccggtttttttcagctcggccacggcagcggctttataggcaggcagtacttcggcatgcacatcgtcgatgcccaaggcctcggccaccacccgtgcactgccgtggttatcgccggtgatcaagtggctgctgatgtgctgcgccttgagttgctgcacggcctgcaacgcgccgggcttgagcgtgtcgccaaaggcaaacagccccagcacgcggggttgcgcgccttgctcgatcagccaggacaaggtgcggccttcggcttcccattccttggcacgcgggcctaaatcgcctgcgtccaggccggtctcttccagcaagcggcgattgcccagcgccaatggacgaccgtcgagcgtacctgcaatgccgcgcccggtcagggattggctggcgctcacatcggccacgtccaagcctcgttcgcggcaagcatccagcactgccttggccagtgggtgctcactgccgcgttgcaaggcgccggcctgttgcaacaacagggcttcgttgccatccacggccgccaagtgggcaatgttgggcgcgccggaggtgagggtgccggttttgtcgaacaccacggcgctcacggcatgggcgcgctccagggcttcggcgtccttgatcaggatgccgtggcgtgcggcgacgccggtgccagccatgatcgcggtcggcgtggccaggcccaaggcacaagggcaggcgatcaccaatacggcgaccgcattgatgatggcggtttccagggaggcgccgtacagccaccagcccaccacggtaatcagcgccaataccagcacggccggcacgaacacctggctgactttatccaccagtttctgaatcggtgccttggcggcctgggcgtcttcgaccaggcggatgatgcgcgccagcacgctttctgcgcccagggccagggtgcgcaccagcaaacggccttcaccgttgatggcgccaccggtgaccgcgtcgccgggttgtttgggcaccggcaggctttcgccactgatcagcgcctcatcggcatggctctggccttctaccacctcaccgtccaccgggaagcgttcgccgggtttgaccagcaccaggtcaccgtgcttcaacgcgctgatggcgacgtcttcttcgcggccgtcctgcacgcggatcgcccgttccggacgcaaggcttcaagggcgcggatggcgctggcggtctggcgcttggcgcggctttccaggtatttgcccagcagtaccaaggcgattaccaccgccgaggcttcgaagtacaggtgcggcgtcacgcctggggcggcggtgagccattcatagatactcaggccgtagccggcactggtgccgatcgccaccagcaggtccatattgccggcgccggcgcgcacggctttccaggcggcgacatagaagcgcgcacccaggatgaattgcactggcgtggccagggcaaactgtatccaggcggggagcatccagtgcaggccgaagggttctaccagcatcggcagcaccaagggcaacgccagcagaatgcccgccaccagcgaccagcgctcgcggcgcagacgccgggcctgatcggcgtcggtggcggtttcgctttggggcagggtggcggtgtagccggccttgtcgacggcggcgatcagcacgctggggtccatctggccctgtacttcgatgtgcgcgcgttcattggccaggttgacgctgacacgttgcacgcccggcaccttgcccagcgcgcgctcgacccgcccggcacagctggcacaggtcatgccgccgatgggcaggtcaaaggtggtggatccattcatggggcagtcctccaagagaagttgccactaggatcaaccttaacctgtggggaaggtcaagcccgatcgttcccacgctctgcgtgggaatgcagcccgtgacgctccgcgtcaccctggcgttgaagtagtgccttgtacccgggacgcggagcgtccgatgaggcgttcccacgcagagcgtgggaacgatcgtggggttactcagtattccaatgccgcagctttgaggtacatgccgtccgggcccagggcaatgcgtaatttgcgtacatcaccggctttcaaggtgatgttctgcgcaggtggcgcgagtaggcccggcagacagcctgcagcttggcccggcaaaagcttcaggcgcagcgacgtatcgccggggggaagattgaatgaagtggcctgttcctggaacagacgcccggcgagttggtcctggatatacaggccgatctcgcagtaggtcggcacttccaggcgttcgcgggaaataatcagcactgcataatcttcagcagcgagggcctggggcgcagcggcaggcaagctcatcaggccggcaagggcaaaaaacaaccagcgcatggcgaatgctccgtggttcacagctaggaaggttgaagcttggccgacgtcgccgccgaataccagcccggcagaaatactgagaacttgaccttgccatcatggcaagctcgacactgggctcaacctcatcaaaggagtcatgtcatgcaaatattcagcgttgaaggaatgacctgcggccattgtgttaaagcggtgacccaggcggtacagagccaggatccggcggcgagtgtggaagtcgatttgaaggccaaagaagtgcgggtggcaagcggtctgtcctcggacaaagtgatcgacctgattaccgaggaaggctacagcgccaagctggcgtgatttttctgatcgttagccacctaacgtaatgttcatggcacccaagcgcggctagactgttgagctgccgactcacttgggtgtctgatgaaccttcgcataatcctgattctgggcgccttgagcgccttcgcgccgttggcgatcgatttttacctgccgggctttccggcaatggccacggccttcgccactgacgaaaaacatatccagctgaccctggccgtgtatttcgccggcctggccattggtcaattgatctacgggccgttggccgaccgctttggccggcgtgtgccgctgctcagcggcgtcaccctgtttaccctcgcgtctttcgcttgtgcgtatgcgccgtccctggaatggctgattggcgcgcgcttcgtgcaggcccttggcgggtgtgcgggcatggtgatttcccgggcggtggtcagtgacaaatgcgatgccgtggggtcggccaaggtgtattcgcaactgatgctggtgaccggcctggccccgatcctggcgccattggccggtggcctgatggtcggcgtgtggggctggcagtcgattttcctggcgttgtcgttgttcagcgtgatggcggccatcgcggtggcggtcgggttgccggaaaccttccctgccgatcagccgcgccagccgttgtcgggctcgttgcgccgctacggctcgctactgtcagaccgggtgtacctgggctatgccttgaccggcggtatctcgattgccgggatgtttgcctacatcgccggttcccccttcgtgtttatcaagctctacggcgtgccggccgagcattacggctggttgttcggctccaacgccgcgggctttatcctggtggcgcaactgaacgcacgcttgctggccaagcgcggcccggcgtttttgctgtcgcgcactgtgtgggtgtacgtggcggcggcgttgacgctgttggggattgccgcgttgcgtaccgaggcgctatggccgttgttggtgccgctgtttatctgtatcgccagcctgggctgtattttgccgaatacctcggcctgtgccatgagcgggcagggcgctcgggccggcagcgcgtcggcgttgctcggttgcattcagttcggtgtggcggcaggcgcggcgtcgttggtcggcgtgttgcacgacggcacggcgatgccgatggccatggtcatcagcctatgcggtgtgctggcggtgaccattgccatggcgacccagcgcctgcaacgggcaagggccgtacaggcgcaggtctgaagttggtctcagccagcggaacgttgctggttgagagggaagcgatggggcgcctggatccgggcttgcagcgtgtcggcaaaagcgcgggcctcggcctcactgcgaaagttgatggcctcgccgtcgagacgaacttgccattggctgcctggggattttgctaacgcttttatcaggattttcattgctgacttcctcacgtaaaagaatcgtggcaaaggcggccaatataaacctgaacgggctcataaagatgacaaggatcaactctcggactaatggtgtcgtccattacctacgtagataacggacgacgctgacagccgttttttcagaacccttccagcacgatcttgcccttggccttgccgctttccagcagggcgtgggcgcggcgcaggttcgccgcattgatcacgccgaagtgctcgcctaccgtggttttcaggatgccggcgtcgatcagttcggccacgcggttgagcaggttgtgctgctcgatcatgtctggcgtctcgaacatcgaacgggtgtacatgaactcccagtgcagcgacaggctcttgcgcttgagcttgctcacatccagggccttgggatcgtcgatcaacgccagcttgccttggggttgcagcgcttcgaccagttggtccaggtgatgctcggtctgggtcaggctggcaacgtgggtgacatgcccgtgcccggcctgtttcaacgcttcgctcagcggctggctgtggtcgatcaccaggtgtgcgcccagggccttggcccatgcctgggtctcggggcgtgaggcggtgccgatgaccttcagcgccgtgagctggttagccagttgagtcaggatcgaccccacaccaccggcagcgccgacgatcagcaggctctggccttgatcgtctttgccttcaggcacctgcaaacgttcgaacaacagctcccacgcggtgatggcggtcagcggcaatgcggccgcttcggcaaaccccaggctcttgggcatatggccgacgatgcgttcatccacggtgtgcagttcgctgttgccgcctgggcgtaccagggaaccggcgtagtacaccttgtcgccggccttgaacaacgtcacgtcactgccgaccgccttgaccacacccgccacgtcccaacccagcactttggcggcgccattttccggggcgacgttctggcgcactttggtgtccaccgggttgaccgagatggctttgacttccaccaacaggtcacgggggccggcctcgggggctggtagttcgatgtcttgcagggattttggatcgttgatcggcagtgaggcgtagtaggcgatggctttcatgatgactccaagtgaatacggtcaaggtaggagcgagcttgctcgcgaaaagcgttaacgatgacgcggtgtttctggtttaacgcgtcggtctttaggttttcgcgagcaagctcgctcctacagaaaaaagtgggatcaggcgagaaatttcaggcgcttgagttcgaagtgttcgatcacatcggcggccttggcgcgaaagctctggatatgcgcgctctggtcgtggtcggccagcgccgcgtcatcgctccagcgctcgagcatgtagaaggtctcggggtgttgcaggtcctggtgcaggtcgtactgctcgcaaccggcttccaggcgggtcggttccagcaggccgcgcagcagggtttccagggtggcgtgctggccgggtttggcgatcagcgtggcgatgacattaaaagcggtggacatagtcgactcctggcacgggctaacgggatgggcagatgattggctatttcccacgccgataaaagcggctaaaacagcaggctgtttcaaccaaatattgataatggacaggaatgcatgctgcgttttgatgatttacagttgtttgtgcgggcggcggacttgggcagcctgtcggccgcggcgcgggtcatggacctgtcgccggcggtggccagcgccgcgctcaagcggatcgaacagcaactgggtacgcgcttgctggcacgttccacccgcagcctgcgcctgacggccgaaggcgagggcttcctggagtatgcgcgggcgtcactgagcgcgctggatgaagggcggcgcctattggccagtggccaggatcacgtcagtggtgtgctgcaattgtccgcaccctcggattttggtcgcaaccaactgttgccgtggctggatgcgttccagcaggagcatccgcaactgaacgtgcgcctgttgcttggtgatcgcatcgccgacctgttccgccagcccgtggacattgccctgcgctacggcgaacccgaagactccagcctgattgcgctgcccatcgccccggacaatattcgcgtgctctgcgctgcgcccagttacctcgcccggcatggcgagccgcggcatctggaacaattggcccagcacaattgcctgctgtacatgctcggcagccgcgtccacgaccactggggtttttacgatggcaagcgccacgtaagcctgacggtcagcggcgatcgcttcagcgatgacgctgatgtggtgcgccgctgggcggtggcgggcatgggcatcgcctacaagtcgtggctggatgtgagcaccgatgtgttggccgggcgcttgcgtttgatcctgccggaactgcagggcgagcgcaccccgctcaacttgctgtgcgcccaccgtgcgcaattgagtaaacccatcaatctgctgcgggacatgctcgtgtcccgttgtgcgacattgaccgcgcagcgaccggggtgaatgggttctcggcaatagcctgcgccacgctcggaagtttcactcatatcctgtcctgatctgcattgtcagacgccgcggagcctatggcctgcgcacctatacttgggcgtcaaccgcagcagaaaaaatggtttaacagggagtgaatacatgggagcagcaccttgcatcagtcagatcgccagcttgctcgccgagcctaaacgcacggccatgctctgggccttgatggacggttcggcgaagtcttcagaagaactggcggctctggccgagttgtcgccagcgtcagccaatgcgcatttggcgcggctgaccggcagcggcctgttgcggatcgaagcgcggcggggccagcgcctgtttcgggtagcggccgccgatgtcagtgccgccatcgacgcgttggccagcaccaccatggccagcgcggcccgcagcactccggatgtgttgccgccggcgctgcgggcaccgccgttgctgcgccgcgcccgctggtgccacggccacctcggcggcgagctggcggcgcagctgtatcaacggatgctggaggccggatggatcgagcgccatgagccgcgtaccgaagtgacgcccaagggtgtgcaggcgttggcggaactgggcattttcactcaggcactggcaacgccgctggcctgcgactgcttcgactggagccagcaacaaccccacctgggcggtgcgttgggggcgggcttgatgcagctgtttttgcaggcgaactggatcagcgtgatcaacgaatctcgggccttgtctgtcactgatgtagggcttgagcacataacccgcatcgccaaactgtaggagcgagcgtgctcgcgaaaaacgtgagtgcgccgcgttttatgcagatgccccgcgttatcgttgacgatcttcgcgagcgagctcgctcctacaggagttggcgtcgttctcaggtgttgtcaggtcgcatccagcaatagccggcgcaaacgatgtcgcacactcgtaagggggatttttcatacgaggggtgcagcatgggtaggcagggttatagcgcggcggaacgcctggaacggttgcccatcagcggttaccaccgaatcattttcatcatcatcgccctggcgttttttttcgactccatggacctggcgatgatgaccttcctgttgggctcgatcaaaaccgagtttggcctgagcacggcccaggccgggttgctggccagttcgagttttttcggcatggtggtgggcgcttcgctgtccgggatgcttgctgatcgctttgggcgtaaaccggtgttccagtggagcatcgtactctggggcctggcgagctacttgtgctccacggcgcaaacggtggagacgctgacgttgtttcggattttgctgggcattggcatgggcatggagtttcccattgcccagtcgatgctgtcggagctgataccggccaagcgacgtggacgttacatcgccttgatggatggtttctggccattgggttttgtggcggcgggcgtgttgtcttacttcttgttgccggtgattggctggcgcgacatcttcctggtgttggcgataccggcggtgtttgtgctggccatccgtttctttatcccggagtcgccgcgttggctggaacaggcggggcgccatgaggcggcgaacaaggtcttgctgggtatcgagcagaaggtgcgcgattccctgggccgcgccgacttgccggagccgattgccctgccacgggtggagagtgcaccggggacgtttttctccgcgttccagcagctgtggtcggcgcaataccgccagcgcacgatgatgatctggagtgtgtggttcttcgccctgcttgggttctacgggctgacgtcgtggttgagtgcgttgttgcagcaatcgggttttgccgtgacccagtcggtgtattacacggtgatcatttccctgggcggaattccaggctttttgatggccgcgtggttggtcgagcgctggggacgcaagcccgtgtgcgtggtcaccttattgggcggcggggtgatggcgttcctgtatgggcagagcgcagtgtttggcggcaacgtgggcctgctgatcacctcggggttgttgatgcagttcttcctgtttggcatgtgggcggtgctgtacacctacacaccggagttgtatcccacctcggcacgtgcgaccggctcggggtttgcgtcggcgattgggcgggttggctcgttgctggggccgttggtgaccgggttggtgttcccgataaccgggcagggcggggtatttgccttgggcgcgctgtgctttgcggtggcggcgctggtggtgtggctgtttgggatggagaccaagggcaagaccctggaagaactcacacaggcttgaagctgatggggtcaatgtgggagccgggcttgcccgcgatagcggtaggtcaggtaataagaggctggctgatacaccgctatcgcaggcaagccagctcccacagtttgagtccaggtctattcagttatggcttcacgagccgcgcatccaggctgttctgtgccaggcgtttggcctggtcctgggtcatgcccaggctggtgtgcagcgcatggaagttctcggtgacgtaaccgccgaagtacgccgggtcatccgagttcactgtaaccttcacgccacgttcgagcatgtcgaggatgttgtgctgggccatgtcgtcgaacacgcagagcttggtgttggacagcgggcacacggtcaacgggatctgctcgtcgatgatgcgctgcatcaagcgctcatcttcgatggcgcgcacgccatggtcgatgcgctggattttcagcaggtcgatggcttcccagatgtactcgggcgggccttcttcaccggcgtgggccacggtcaaaaagccttcgtgacgggcacggtcgaacacgcgctggaacttgctcggtgggtggcccatttccgaactgtccaggcccacggccacgaacgcgtcacggaacggcagcgcctggtcgagggttttctgcgcttcgtcttcgctcaggtggcgcaggaagctgaggatcaaaccgctggtgatgcccagttgctgctcgccgtctttgagtgcagcggcgatgccgttgagcaccacttcgaacggcacgccacggtcggtgtgggtttgcgggtcgaagaagggttcggtgtggatcacgttctgggctttgcagcgcagcaggtaggcccaggtcaggtcgtagaagtcctgggatgtgcgcagtacatcggcgcccttgtaatacaggtcgagaaactcttgcaggttgttgaaggcgtaggccttgcgcagggtttcgacgtcgttccatggcagcgcaatcttgttgcgctcggccagggcgaacagcagctcaggctccagcgagccttccaggtgcaggtgcaattcagccttgggcagggcgttgagccaatcgtacatttttaaaatctcatcaggtgcaatggcggcattctacaggccatggctgaaataatcggcaaaacctgaccagcaggagagtatttctgtcactcacgcaagggcggcctgaactaaggtgtaacgaaacgttagcggctcggcgcagtctgtaccccatcaaagactgatttgttgtacgaaaaggcccggaatgctcacatccctcaagcaagaaaaattcatgctgctggcgctgattgccgccatcgccgcctacccgctggaacactggatgctccacagcggccaactggttgcgctgctggccggctttgcgctgatcgcgtttatcgtgatggcatcgatgcgcgtggcccatcacgccgagcagttggcggaaaaagtcggcgacccctacggcaccatgatcctgaccctcgccgccgtattggtggaagtggtgatcctggcgatcatgatgagcaacgagccatcccccactttggtgcgcgacaccatttactcggcggtgatgctggatatcaacggcatcctcggcctggctgcgctgatgggcggtatcaagcatggcgaacagtcctacaacgatgactcggcgcgcacctacagcgtgatgatccttaccgccatgggtgtgtcgatggtggtgccggaatttatccccgaagccgactggaaaatttactcggccttcaccattggcgcgatggtggtgctttacaccttgtttttgcgcatgcaggtggggccgcacagttatttcttcagctacagctacccggaaaaacgccgcaagaaacagcctgaagacgagcacgcgccgtctgtcagcctgacgttttccattgcgaccctggtgtttggggtgatcgtgattggcgcgttggccgaggtgatgtcaaagaccctcgacctgggcctggaaggcacaggcgcaccgccggtgattaccgcgattgtggtggcggctatttcggccgcgccggaaatcctcacggcactgcgcgccgcgttggccaaccgcatgcagtcggtggtcaacatcgcgctgggggcttcgttgtctacggtgattctgacggtgccggtgatggaagccatggcgctctataccgggcagccgttccagatggcgatgacgccggtgcaaacggtgatggtgtttatcaccctgatcgtcagcgcgatcaacctcaacgatggtgaaaccaatgcgatagaagggatgacgcattttgtgttgtttgcgacttttatcatgctgtcgctgttggggctttaacccgatttgaaaggtgccgcagttccaaggtgggagcgggcttgctcgctcccacattttggttggcgcctggcttaggtgcccgcgatcaactgccgcgccgcctggctgtgatcggcgatcaagcccttgaggtcaaggccttcgacttggccgttgatcacccgccacttgccaccaatcatcactcggtctgcccggtccgcgccgcacagcagcagcgcggaaatgggggcatggctgccggagaagcgcagttcatcgagtttgaacagtgccaggtccgcctgcttgccgacggccaactcgccaatgtccgtgcgccccagcaactgtgccgagcccttggtggcccagcccaatacgccttcgggggtgatcttttccgcgccataacgtaggcgctggatgtacagggcctgacgcgcttcaaggatcatgttcgaggcgtcgttggaggccgagccgtccacacccaagccgatgggggcgccggcggcaagcaggtccagggtagggcagatgccggaggccaggcgcatattcgagcttgggcaatggcagatgccggtgccggcggcgcccaggcgctcgatttcgtccgggttgaagtgaatgccgtgggccagccaggtgcgcgggccaagccagccgacgctgtcgaggtaatccacggtacgcagcccgaagcgttgcaggcagaaatcttcctcatcgagggtttccgccaagtgggtgtgcaggcgcacgtccaactggttggccagctcggcactggcttgcatgatttcgggggtgacggaaaacggcgagcacggcgccagggcgatctggatctgcgcgccgtcaccgcgctggtgatattcgcggatcaggcgctggctgtcgtcgaggatcacttggccttgctgcacggtttgctgcggcggcaggccgccatcggcttcgcccaggctcatggaaccgcgggtgagcatggcgcgcatgcccagttcgcgcacggtctcgacctgcacatcaatggcgttttccaaaccatcggggaacaggtagtggtgatcggccgccgtggtgcagcccgagagcagcagttcagccaaggcgactttgctggccagggcgagtttttccggcgtgagccgcgcccataccgggtacagggttttcagccagggaaacagcggctggttgaccaccgggccccaggcgcgggtcagggtttgatagaagtggtggtgtgtattgatcagcccaggcagcaccacatgctcgcgggcatcgaacacctgcgcgcagggttgtgcaggcgcttgcccttgggccagcacttcggtgatgacaccgtcttgcagcaccaggccgccacgggcatcgaggccattggcagtgaaaatcgcgagggggttttttaaccagatacgggtcgcaggcattggccggctcctctgaatgatgggttcaggtttgccagctcagtgttgccctgtctgctgatccagggtcgccgggaagggcgaggtgggcagtttacctctgtgggagcgagcttgctcgcgaaaatcgtcaacgatgacgcgggcagtctggtttaacgcgttgcctgggcgttcttcgcgagcaagctcgctcctacagtttggggattaccaggcgatggtgtcgcctttgtagtcgacgaagtggtggccgcctttgccggtgtaggcatttacctggtccaccaggccgcgcacgctggtctcgacgtcgatgtgggcgttttcgccgcccatgtcggtcttcacccagcccggatgcagcgacagcaccgtcggcttgggctcgcccagttgcgtgataaagctattggtcatcgaattgagcgcggctttgctggccttgtacagcgccaggtccgagccgtcgggaatggtcacgctgcccagtaccgaactcatgaaggccagcacgccggtgtctttgcggatctgcccgacaaaacgctgggccaggttgatcggcgccacggcgttggtgaagaacaactggccgacttccgccagggtcgcgtggccgggttcctggttggccgggcccttgacgccggcgttgacgaacagcaggtcgaaggtacgatctttcaggcgttgggccagggcgatcacggcttgctgatcgtccatatccaacttctcgatctgcaccggccccacggctttcagggcatcggccttgttcgggtcgcgcacggtcgcggtcacgtcccagccgtcctggagcagttgcttgaccaggccaaggcccagcccgcgcgaggcgccgatgatcagtgcggtttttggcgtagacatgaaaggcttcctttgaaatcgcggttcagggagttcagcgcataacagtagcagtttcagcgttcgagcaggatgcgcccacggctcaggtcggcgagctgggtttgcagggtgtcgatgtgcgcctcccccagggcgagctgcagctctacgccgttggcggtgaaggtttcttccaccacaagcccgccgagttcagcgacacgcagcttcaccaggttcagttcagagaacccgcaggcgcaacgcagggggacgcggctgatcagctcgatgcgttcggcattctgcaggcatttattggccccgccgccataggcccgggccaatccacccgtgcccagttgaatgccgccgtaccagcggatcaccaagacggtcacctgatcaaagccctgggcctcgatggccgcaagaatcgggcgcccggcggtgcctccgggttcgccgtcatcgctgctgcggtattgatcgcccagcttccaggcccagcagttgtgcgtggcgttgaggtcgctgtgctgctcgaaaaacgcctgggcgtcttgcgggctggtaatcggcgccgccaaggtgataaagcgacttttgcgtatttcttcacgaaactcgcaaaagccggtgagcgtaaaagacataaattgcttcgtttatagggctggcttgatgccgcagcctttgagaatgatatggatcaggttggtgccagcatcttccatgtcctgcttggtcagcttggtgcgaccggtaacacggcagatctgggtggcgaagtcagcgtagtgctgggtgctgccccacagcaggaagatcaggtgcacggggtcgacggggtccattttgccagcgtcgatccaggcctggaacaccgcggcacggccactgaaccaggcccgatagtcctggccgaaatattcagtgaggcattggccgccgctgatgatctccatggcgaagatccgcgaggcctggggctggcggcgcgagaattccatcttggtgcggatgtaacgagcgagcgccacggccgggtcatcttcggcggtcagcgcgttgaaggtgctgtcccacagttcgaggatattgctcagcaccgcgacgtacaggcccagcttgttggtgaaatagtagtgcaagttggccttgggcagcccggcactggcagcgatggtgttcatgctggtgcctttgtagccatgacgcgcgaattcatcttcagcagcctggagaatcgcttgttcgttcttttgccgaatgcggctggcgggtttaccggcgtggttgctgtgggcaggaacttcgaggctcatggaggtttccgtgctgatcgatagagacgacgtgtgcacagataacccaccctcaagcctcagacaagtcctgatgcaataaaaccgtcaaagcggttccaggctgtcgcgttccgggttgtggtttgcggcggcggtacttgccttggcctccggcagtaacaggcacaacacaatggcggtgatgccgccgctggtgatggcggagtcgaacaggttctgcaccagagtcggcatcaggtgcagcaggttgggttgcgcggcgatacccaggccaacgccgaacgaggtggcgatgatcagcatgctgcgtcggtccagcggcgcctgggcgaggatgcgcacgcctgccgcggccacgctgccgaacatcacgagggtggcgccgcccagtaccggcttggggatctgctgcagtacagcgccgatcagcggaaacaggcccagacagaacagcaacacgccgatgtataaaccgacataacggctggccacgccggtgagttggatcacgccattgttctgggcaaacgtggtgttggggaaggcgctgaaagtggcggcgatcatgcagctcaccccatcgccgagcacgccgcccttgagccggcttatataagaagggccgctgatgggctggcgggcaatcatgcaattggcggtgagatcgccgacggtttcgatgctgctgatcagataaatcaacgcaatcggcaggaaggcgctccagtcgaagttgaaaccaaagcggaatggtgtaggcaggctgaccaatggcaagtcaggcaacgcctggggaatcagtttgccgctgaaccacgccgccaggctgcccagggccaggccgatgatgatggccgacaaacgtacccagggcgtgttcgagcggttgagcaggatgatcgtcagtaccacgaacaggcccagcgccaggttggcgggggcgccgaagtccggtgcattgaaaccgccgccgaggtcggtgatgcccactttgatcaggctgatgccgatcagcgtaatcacaatgccggtcaccagcggtgtgatcacgcggcgcagctggccgataaagcggctcaatacgatctgcactgccgcgccgaagaagcacacgccgaagatcatcgccagaatgtcttccgggctgccaccgcgttgcttgaccagaaagcctgctgacaacaccgcgccgagaaacgcaaagctggtgccttgcaggcagatcataccggcaccgatgtcaaacggcctgcgtgcctggatgaaggtgcctacgccggaaaccatcaacgccatgctgatcaggtagggcaagtgagcggtgaggccgagggtggagccgatgatcagcggcggcgtgatgatgccgacgaatgccgccagtacatgttgcaaggccgcgagtagagcaggcagtggtttcgggcggtcattgaggccgtagatcaggtcgctggggctggaggattctggaggcatggcgggttaactcaaggcggacggttcaaggtccttgagcccttgcaaaaagctgtccaggtgctcagctttttgtgtagcgcccgatttagcgggtggcggccaggctttcgaggaaactttccagcaccaaatgagggcgacggcccttgcgcgtgaccgatgccaggctcaaatcgtaaaaacgtgtagccggtttcagcgcacgcagtcggccttgttgtacccacaggctggcgtaatgatcgggcaagtagccgatatagcgcccggtgagaatcaggaacgccatgccttcacggtctgaggcgctggcggtgcagttgagcgcctggtaatgggcctggatctccgcgggcaagcggaaggtgggggcgatggcgtcctggctatcgatgcgttcgtcgtcgagttgcttgttatcggcgtaaaacagcgggtgaccgaccgcgcaatagagcaaggagcgttcgctgtacagcggctggtattccaggcccgacagtgcgctggcctggggcaccacaccgacgtgcaggcgaccgtcgagtacgccttgctccacttcattgggggcgatcatgcggatctggatctgcacgtccgggccgcgttccttcagctgcgccaatgcgtgggtgatgcgcatatggggcagggtcaccaggttgtcggtgaggccaatgatcaactctccgcgcaaatgttggtgcaggccgttgacctcggtgcgaaaactttccagggcactcagcagttgcagggcagattgataaacctcgcggccttcttccgtcagggaaaacccggcacggccacgttggcagagcctcagcccgagccgttgctcaaggtcgctcatctgctggctgatggccgagcgcccgatgccaaggacggtttccgctgccgagaagccgccgcactccaccacgctgcgaaagatgcgcagcaggcgaatatcgaagtcactgacttgtgccaaagggtcgggacgacggctgctcatagtttagtgaagtcctgactgaaggttagaagagttggatttcaccgactttatccccgtggcaatttagctgcaacaacgctttttcaatcccgacgctgccttttgccctgcgaggttttgctgatgaacatgcccgaaaacgccccatcgtccctggccagccaattgaagctggatgcgcactggatgccttacaccgccaaccgcaacttccagcgtgatcctcgcctgatcgtggccgctgaaggtagctggttgaccgatgacaaggggcgcaaggtctatgattcgttgtcgggcctgtggacctgtggcgccgggcatacgcgcaaggaaatccaggaagcggtcgccaagcaattgggcaccttggactactccccaggctttcagtacggtcatccgttgtccttccagttggcggaaaagatcaccgacctgaccccaggcaacctcaatcatgtgttctttaccgattcgggctctgaatgcgccgatacagcggtgaaaatggtgcgggcctactggcgcctgaaaggccaggccaccaagaccaagatgattggtcgcgcccggggttaccacggcgtgaacatcgccggtaccagcctgggcggtgtgaacggtaaccgtaagctgtttggccaggcgatgatggatgttgaccatctgcctcacaccttgctggccagcaatgccttctcccggggtatgccggagcagggtggtattgccttggccgatgagttgctcaagctgatcgagctgcatgacgcgtcgaacatcgccgccgtgtttgtcgagccgatggccggttccgctggagtattggtgccaccgcagggttatctcaagcgcctgcgcgaaatttgcgaccagcacaatatcctgttggtgtttgacgaagtgatcacaggctttggccgcaccggctcgatgttcggtgccgacagcttcggcgtgaccccggacctgatgtgcatcgccaagcaagtcaccaacggcgctatcccgatgggcgcggtgattgccagcagcgagatctaccagaccttcatgaaccaggcgacgccggaatacgccgtggaattcccccacggctacacctactcggcgcacccggtggcttgcgcggcgggattggcggcattggacctgttgcagaaagaaaacctagtgcagagcgtcgctgaagtcgcgccgcactttgagaatgcgctgcacggtttgaaaggcagcaagaatgtgatcgacattcgcaactacggcctggccggtgcgatccagattgccccgcgcgatggggatgccatcgtgcgcccattcgaggccggcatggcgttgtggaaggccggtttctatgtgcgttttggcggtgacaccctgcagttcggcccaaccttcaacagcaagccgcaggacctggaccgtctgtttgacgcggtcggcgaagtgctgaacaagatcgactgatttctccttctatatagaacaatttttcaggagccctgcatgagccttatccagcatttgatcaacggtgaactggtcaacgacagcggtcgtagtgccgacgtctataacccgtctaccggccaggtgattcaccaggtgccgttggccagtcgtgaaaccattcaacaggcgattgattcggccaaggctgcgtttccggcctggcgcaatacgccgccagccaagcgtgcccaagtgatgttccgtttcaagcaattgctggagcagaacgaagcacggatctcgcagttgatcagcgaagaacatggcaagaccttggaagacgcagcgggtgagctcaagcgtgggatcgagaacgtggaatacgcgtgctcggcaccggagattctcaagggtgaatacagccgcaacgtagggccgaacatcgatgcgtggtcggatttccagccgttgggcgtggtggcgggtatcaccccgttcaacttcccggcgatggtgccgttgtggatgtacccgctggcgatcgtctgcggtaactgtttcatccttaaaccttcagagcgcgacccgagttcgacgttgttgatcgcgcagctgttgcaggaagccgggctgcctaaaggcgtgctcagtgtggtgcatggcgacaagggcgcggtggatgcgctgatcgaagcgccggaagtcaaagccttgagttttgtaggctctacgccgattgccgagtacatctattccgaagcgaccaaacgtggcaagcgtgtgcaggcgctgggcggggcgaagaatcacgcggtgctgatgccggatgcagacctggataacgcggtgagtgccctgatgggcgcagcttatggttcctgcggtgagcgttgcatggcgatctcggtggcggtgtgcgtgggcgatcaggtggcggatgcgttgatcgccaagctggtgccgcaggtcaaggcgttgaagattggtgcgggcacttcttgcgggctggatatgggcccgttggtgacggggcaggcgcgggataaagtcagtggttatatagaagacggtgtgtcggcgggtgccgagttggtggttgatggccgtggcttgagtgttgccgggcatgagcaaggattcttccttggcggtagcttgtttgaccgcgtcaccccgcagatgcgtatctataaagaagagatctttgggccggtgctatgcgtagtgcgggtggatagcctggaagcggcgatgcagctgatcaacgagcatgaatacggcaacggtacttgcatcttcacccgtgacggtgaagcggcgcgtctgttctgtgatgagattgaagtcggcatggtgggcgttaacgtgccgctgccagtgccggttgcgtatcacagctttggcgggtggaaacgttcgctgtttggcgatttgcatgcctatggtccggacggggttcgtttctatacccgtcgcaaggcgatcacccagcgttggccgcaacgggccagccatgaagcgtcgcaattcgcctttcctagtctgtaaggctcggtaggtagaaggccggccccttggggccggcctttgcgtcattggggcttttttgacctatatgacagaaatgtgaaaaagaaggttgacggcagattctggaagcctataattcgccccacttccggcgcagtcgaaacggaaaactccttggtaaacaannnnnnnnnnnnnnnnnnnnnnnnnnnnnnnnnnnnnnnngattaaattccgaaaccccaattgcgaaagcagttggggttttgttttgggcgcttgaaaagtgtccaccttgtccccgtacacttgttcgtcctgtgtccgccaaaccccacctgactgccccgacaaatttgcacagttatttctgagcgacaccactagaatagccacctaaccatttttagagtcagagccctatctatgcccgatccggttgatgcccgcgaggtgtcggatttaccgctggacgatctggtggcatgccatgagtgcgacttgctgatgcgcaaaccaacgctcgccctcggcgaaaaagcccaatgcccacgctgcggctacgagctatacgctcaccggcacaatgtggtcgagcgcagcctagccttggtactggcagctctgctgctgtacatccccgcgaactttttgcccatcatgcagctcaatctactcgggcagtcctcggaggacaccgtgtggagcggcgtggtcggcctgttcgataccggtatgcaaggtgttgccgccgtagtgttcctgtgcagcatgggcatccccttgctcaagctcctgtgccaattggcagtgctgctcagcattcgctggaacatcggtcgcaactacgggttgctgctataccgcatctaccaccacatgaaggattgggggatgttggaggtctacttgatgggtgtgctggtggcgatcgtaaagctcgccgacatggcctccatcaccattggcctgggtctggtctgcttcgtcagtttattaatggtccaagttctgcttgaggtggtgatgtcgccccatcagatctggcaagcgctgtcaggagaggatgaccatgcgggcgattgatgcaggcattctgatttgtactgaatgccatgagttgaacaagcaggaagcggatatcgaggagcaactctgcacccgttgcggcgcgttgatccatgcccgtcgccccaatagcctcacacgcacctgggcgctgttgatcaccgcggcgatcctgtatatccccgctaacctgttacccatcatgacggtcaactccctcggccaaggcgaccccagcaccatcatgtcgggagtcatccagctggtgcagcacgggatgtttcctatcgctgccgtggtgttcatcgccagtatcctggtaccgaccttcaagttggtcggcattggcctactgctgttctcggtgcagcgtcaccaaccgctgtccgcgcaacaacgcattgtgatgtatcgctttatcgagttcattgggcgttggtccatgctggatatcttcgtgatcgccatcctggtggcggtcgttaactttgggcgactcgccagtgtcgaggccaacctcggcgctgcggcgttcgccagtgtggtgatcttgacgatgcttgccgcagtaactttcgatccccgactgatttgggataacacggagtcggacgacgaccatgagtgatttgcctaaagctaaaacccgcccagcctctaactggtcggccatttgggtgttgcccctgattgccctgatcatcggtggctggctggggtggcgtgcctattcccagcaaggtatcgagattcaagttcgctttgagagcggcgaaggtattcaggtcaacaagactgaagtggtctacaaaggcatgaccgtgggtaaggtcaaaaccctggccctggatgatgagggcagcaatcgcggggtgatcgccaccatcgagatgaacaaggacgttgagcagtacctcaagaccaacacccgcttctggttggtcaagcccagcgtcagccttgccggcatcaccggcctggaaaccctggtctcgggtaactacatcgccgccagccccggtgatggcgagcccacgcgcaagttcaaggcgctctccgaagagccgccgttatccgacgccaagcccggcttgcacctgaccctaaaggccgaccgcctgggctcgctgaaccgtggcagtccggtgttctacaagcagattcaggtcggccaggtcaaaagctatctgctgtccgaggaccagagcacggtagagatcaaggtctatatcgaaccgacctacgccaacctggtgcgcaaacacacgcgtttctggaacgccagcggcatcagtatcgatgccaacctttccggcttgaaagtgcgcagcgaatccctctccagcattgtcgccggtggtattgccttcgccacgccagagaatcgcaaagacagcccgcccaccgacccgagcctgcctttccgactatacgaagatttcgatgccgccgcagcgggcatcaaggtcaaggtcaagctcaccgactttgaaggcctgcaggccgggcgtacgccggtcatgtacaaaggcatccaggttggcagcctgaaaaccctgaagatcgacccggacctgtccagcgccagcgccgagctgaccctcgacccattggccgaggactacctggtcgaggacacgcaattctgggtggtcaaaccgtccatctccctggcaggcatcaccggcctggaggccttggtcaagggcaactacattgcgattcgcccaggcgacaaaggcaccccgccacaacgcgaatacgtagcccgcgccaaggcgccgccgttggacctgcgttccccgggcctgcacatggtgttgctcaccgacagcctgggttcgctggatgtcggcagcccgattctgtacaagcaggtcaaagtcggttcggtgcagagctaccagttttcgcgcaagaaaaaacaactggtgatcggcgttcatatcgagaaggaatatgaaagcctggtcaacggctcgacgcgcttctggaatgccagcggcgtcaccctcacgggcggcctcaccggcggtatccaggtcaaaagcgaatccctggctagcctgatggcgggcggtatcgccttcgaaacgccggaaccgaatgtgccgttgaaacatcgtatcccgcgcttccgcctgtacgccgaccgtgatgccgccaaccagcacggcaccctggtgaccatcaaagtcgaccgcgccgacggcctgagcgccggcacgccggtgcgcttcaaggggttggatgtgggcaagatcgagagtgtcgacctcagtgccgacatgcagtcggtgctgctcaaggcgcgtatcactcaggttgcggaccgtatcgcgcgttcgggcagtcagttctgggtggtcaagccggaactggggctgatgaagacggctaacctggagaccctggtcaccggccaatacattgaagtgcaaccggccgcaaaaaacgccggcccgcagaagagttttgtcgccctggcccagccgcctgaagccgtgcatcaggaagctggcctgagcctcacactcagcgccgcccgccgtggttcgttgaaggaaggggtaccggtcacttaccgtgaagtgacggtcggcaaagtcaccggctatgagttgggccagaccgccgatcgtgtgttggtgcacatcctgatcgagcccaagtacgcacctctggtacgcagtggcagccgcttctggaacaccagcggctttggcctcgacttcggcttgttcaagggcgcgaccgtgcgtaccgagtcccttgaaacgctggtggccggcggcatcgcctttgccaccccggatggcgagcgcatgggcaacccggcacggccgcagcagacgttcccgttgttcgacaagtttgaggatgagtggctgacctgggcgcccaagattccactcggtaaataaaccgaggcgcggccttcgcgagcaagcccgctcccacattcgatcgcatccctacagggaaactcgatcaactgtgggagcgggcttgcccgcgaagaggcccgccaaaacaccacaaatcccaagccgaaaaaaaggccgcgatccatcagatcgcggcctttttgcctttcagtacaacccgtcaggcttcatccagctccggctcgtccgcctgcacattcatcgtcgccttcaccacatcatggcgacggatgtacttccagtccgcctcatcaatgtagatcccgttcggcccgctgccgccttccaggtcgatcgccacctgggcagacacctgcggcttcacactcgccaggatcggcacaaagcccagttgcaggctggtttccaacagcgctgcctggttcttctcatcgatgtctgccgcttcatcgaggtagtacggcaaccgcacgcgaccggcctggtcgcggtccatcaggtgcagcaacaagtacatgttggtcagcgccttgatggtcatggtggtgccgttggacgcagcgccgtcgatgtcggtatggatcactggctggccgttgaccttggtgatctcgaacgccaactcgaacaagtccttgaggcccaactggttatggttggcggcgaccaggcgagccaggtattccttggcttcttcgttcttgttgtcctgttcggcgctctggctgaggtcgaacaccgagagggtctcgccttcttcatactgaccggcactgtggatgatctggtcgatatgcttgagggcttccttgttcggcgccagcacgatgcgaaagctctgcaggttggacacctggcgcttgttgatctcgcggttgaacagcgccaactggtgttcaaggctgtcgtagtcgctgcggatattgcgcagggtacgggcgatatcggtgaccgccgcacgacgtgccttaccaagcgtcaacgcctcatcggtgcggtgcgcataagcgttgatcagcagctgcaggcgacgctccatgtcatcttcgctgtcgaacttggccacgcccttgagacgcacctgggcgtacagcgcttcgatctggccatcggcgcgcagcaagccctgccaactgtcctgatagtcattgagcagcggcagcaggttgtccatggagtcgtcgaccgggtccatgaatggcgtgccgaacggcaggtccgccggcaagagctgacgacggcgcaaggcgtcatccagcgtgcgttgcttggcttccatatcgccgatctggcggccgaccaattgcagcttggccgacagttgctggacgcgctcggtaaaggcatcgctggaacgtttcaactcgtcctgggcggcttccatctgcgccaggttttccagcttctcgccttcttcggcgctcagggtctgggtgcggcggaagtcttccaaagccttctgggcgtccagcacctgctggtacagcgcttcggtctgggtcttgcttgcagcgcggtcggacgccacggcctgctgggttttcagttgcttgagttctttttccagacgttctttctggtcgcgcaacgcggcgcggtccgccagggcttgcagtgccggcggctcgatgtgggagatatcgatggacagccccggcacttcaaagcgctcgcccttgaagctatcgaggatctgctccagggatttgacccactggccgtcttcgtccagcgtgatgccatgttcgcccagcggcaggctgaacaacgagctgttgaacaggcgcatcaagcgttcgacatcctgctgcgagaactcttcgcgcagcttggcgtagctgttgttgtccgcgtgatcgagctgctgcttgaccgacttcaagcgcttttccaggtcgcgcaggcgctcttcgaggtcctcggcgctgaactgccgcgactgcgccaaggcgcccgccagttcatcgtgggcatccttggcggcgagcaattgctgctccagcatcttgacgtcatccaccagggcaaagcggtgcttgagcaccgacaactcgcccagccagcgctggatgccactgatttcccgctccaggcgcatcagctcctgagtgccgccacgctggtcgttttgcagcgcgtcctgctcgttgcggtagtgttcggcctggatggtcagctcttccttgcgcgcactggcgtagtccgaccaggtgcccaacaacgaatccagcagcggcgacaggcgatgcagtttgccgcgcagggcgtcgcgctgtttcacgccattggccagggcttcaaccaaggggccggcagccaccagcgagttgtagtcctgctccatgcgtcgcacatcgcggaaggcttcttcacaggcggcgatgtagtcgacactgcccgaacgcaggctgtgttcgaaggcatcaaggaacagttgcttgagcttggccgcggtgatttcacgcatatgcagcaggttgataaacagcgcgcggaatgttttcaggctctgctcgctggtggagcgcagcggaatcagggtcaggtccagcgggatcgacgtatgcccgcccaccagcaaacgccgcagttcatcgggcttgagttcgtaggctttcaggccctcgcgctcaaggttggtgaacagctctttctggcgcaggcaggtgtcgtttttctggtagtgggtcaggtccagcttgccggcgtaggcaaagaactggtgaccaaagccaccgcccgggccgcggccgaccacgccgatgacgtgggggccgtggggcagggagacttctaccaggatgtagctggtgtcggtggcaaagtaaaaacgccgcgattgttccagggtgtacttgccgaagctcatgtccgacatgcgtgccaggatcgggaactgcaaggcgttgatcgaggcggatttacccaggttgttggcgccgtacaccgacagcggttcttccagcgggaacaagcccaggctgtaaccggcggtgttcaatagggcgaagcggcggatgccgtagcgttccttactcatgcgtcggtctcctgttcttcggcaatggcgcgtgccagggcatcttcttcgctttcttcggtgaaggcgctcagatccagcgggtcatcggtcttcagcagtttttcatcgctgtcttcgtcgatgatcaccggcgccggcagcggcaatacgctgtgtacgctggcggcaaggtcgcggtcttgctgcaccgacaggcacacatccaggaagcggtgcatcggcggcaggaagcggtagacaccgttgtcttcgctggcaaaacccagttgggtcatgcggcgcatgattttttcttcgagctcttcctgggtctgcacctcggcctggataaacaggtcgcggtatttctccagcaacgaaggcaactcatcgcggcccaggctgccaccgtcgagcacggcaatcgggtcacggccctggtcggccaggtgttcgacgatgatgaaggtgaacaaggccaggcgctgggcggtcttgttcacctgcgcggcagccacggcagtgtccggcacgaagtaatagaagccgcgggtatcgcagaccaactcaaagcccagggccttgaacagtgtgcggtactggtcctggaagttcgacaattgcgcgtacagctccgggtcgcggcggctgacgtggtaacccttgaacagctcgcgaaagatcggcgccagctgggacagttcggatagatcaagatgcataaggcgtgctcgcagaattctcggtggcatcaacgccggccgggagcagggcgaaggagcgcaggctgacctggtgctcgtgggtgtggtaatcgcgacgttccaggcgctcgcgcttgaagcgtttttcccgggacaggcgcgagaaccagtacagcaattcatcggtggcgccgtccggttcctgctccagcagccaggtcatcaggtcgggcatcggcagcgcgtcttcgcagcgctcgagcatttccttgaccgtacgcggtgcgcgcggggcttcgcctttgtgcgacttgtgcgccttggggaaacgcgccggtttgggctcgaaattcgccaaggcatacacataggcttcgacctggctggcactgcccagaaaggtgctttgcggtcgcgtgaacatcggcatcgccgcttgcggcaccgcgtccaggcctttgcggcgaatcgctgacagggccagcgccgcaccgcgagtcacggcgttatgccggcgtgcttcttcacgcagcggcagcagcaactcccgtgcatggcgcaaggtcagctgggcgctggtttgcatttcgagaatgcgcgcgtgggtgcgcagcagcatgtcgtcatccaccaggtggccaagacgctgttgctcggtgagcatgcgcagcagcacgttttccaccttgcgcacgccttgctcgaaggcgccgtcggcattcaccaactggatcatcggctcgacgtattcgtcccaggtcgccaatacttcggcgtaacgctggcgcagcgggatctgccggtcgctggtcttggcgcggtcggccacggcggcgagagcttgttcgtcgttggcgagctttttgagcacatcgcgcacgcgcatatccaacaggcgcagttgccgggccaggtcgtggccgtcgcggatgtcaaaggcgtcctggatataaccggccaggcgctccaggtggcgcaggtaggcttcgatttccaggcacaggccaagccggtgctccttgcgaagataggcgaggaagtcgtggatctgcgcgttaagctcgaaacggttcgggctcttggcgacaggcaccaggatatccaggcgaatccacacgtccagcaggctggtgatgtcctggggcgtgctgtccagttgttgggcggccaactgtgcgcgcagctcggccaggctcagggtgccttggtcgaagtgttcgcacagaggctcaagtaaggcccagtgttcggcgagggcgcgcaggacgcgcttgggttcgatcatgggaatggccggctggttggcgattaaaagtcgcgattgtactgcatcacgcgcgggaattatccacagccggtcagtgcgcagtgggcgattgttaccgaacagcggtagaatccccgctctttacttatccacaagtggccgagctgtgcttatcgagtcccgacgtcgcgcttacttgaccgccatgcaggtggtcaactggctgccccgcaccgaactgccgtttgccgcgccgtcgcggcccgagctgttgcaggcgcttgagccctatgaggcgttcgagtcgtcgggagaagaggcggccgcgcctgtggcggtggtcaaacccacccctgaggcgcgtccggcggtcgagcgtgccaagatcgaagtgccgcgcccagcgccggtgaccaaggctgtcaaggtggcggacgaggctgcgccggtgaccaaggcgccggtggtgccgccgccacgcttcgccctgcaattgctgcgggccgggcgctgcctgttgttggtggaactgccgactggcgagcgtttccagtcccgtgacccggcctacctgttgctcaaggacatgctgcgcgccgccggcctgcccgacagcccgcaaatcgtcggtgagccggtgcgctggccgctgctggtgcgcggcaccatggaccagggccccgaggctgcacgagattttgtccaggggtttgtctcggcgcgcctggaagacgagccctgcgtgtgcctgtggctgatcggcctgcccgccgtacggtttgccggtgaagccaatgccgaggcctggtaccgcgagctgcaggttgaaggcctgggttcggtgtgggccctgccgggcctggaattattaatggaagagccacagcgtaaggctgatgtctggcaagccatgcgccggctgatggcgcgctggaaaacaactgatgagtgaggctttatcctttcgcccgatgaccgaggccgacctcgacgcggtgctgaaaatcgaatacgcagcgttcagccacccctggacccgcgggatttttctcgacgggctgggcaagtaccagatctggctgatgttcgaaggcgagcagcaagtgggccatggggtggtgcagatcatcctcgatgaagcgcacttgctgaacattaccgtgaagccggaaaaccagggccgtggtttgggcctggcgctgctggagcatttaatgtcccgtgcctacgcggccaatgcgcgggaatgctttttggaagtgcgtgacagcaataccggcgcgtttcggttgtatgagcgctatggcttcaacgaaattggccgtcgccgggattactaccccgctgtgggtggtcgcgaagatgcagtcgtgatggcgtgcaccctggttgactaaatgcaaaggccctatgtgcaaagcctctgtgggagccgggcttgcccgcgatgcaggcacctcggtcttcaagtaacaccgcggtgataccatcgcaggcaagccagctcccacagggtcagcgcttgcggttcagtgggtccagatcagccagttccgcctcatccaatccattcccgccgccaatgtcattttcccccacgacgctcaagtcatagtcggcggcattgtcttcaccttcctcctgcgcatcccgagcgccatcctcgtggatcagcgtttccgggctcatatcgtcatcggtcgattcatgatcatcggtagaagccccggtcatcccggcttcgcgcacccgttcgtcgggcatcaggtgctcgcgctcgccacgcgggatttcatcgccgatttccgctgtctggtcctcttcgtcaaaatccagctcgcgcatctcacccatgcggtcttcgttgtcatcgatcggttccggctgtgttgcgccgtagggacgtcgtgattcagtcatggccaatcctcatactgtggggcttatagtgtgtggacaggcatggcagccaaaaaattcaagctaattagcgcctggcgtgacccggacgaggggttgtcagtcacaaaactgcgcatcattcctgaggcttccctgatgaacgaactacaagacctgcttgataacaacgaacgctgggcggatgcgatcaaacaggaagatcccgaattcttcgccaagctcgcccgccagcaaaccccggaatacctgtggatcggctgttccgacgcccgtgtaccggccaacgagatcgtcggcatgttgcctggtgatctgttcgtgcaccgcaacgtcgccaacgtggtgctgcacaccgacctcaattgcctgtcggtaatccagtacgcggtggatgtgctcaaggtcaaacacatcctcgtcaccggccactacggttgtggtggcgtgcgtgcgtcgatgcaggaccgccagttcggcctgatcgacggctggttgcgcaccattcgcgacctgtactacgaaaaccgcgatgtgctggcccagttgccgaccgaagaagagcgcgtagaccgcatgtgcgagctcaatgtgatccagcaggtggccaacgtcggccataccagcattgtgcaaaatgcctggcaccgtgggcagagcctgtcgatccatggctgcatctatggcatcaaggacggtcgctggaagagtttgaacaccaccatcagtggcttcgagcaactgccgccgcaataccgcctgcgcccgttgggcgaagcctaaggtcgtttgtgctcacgccaccaggccatgaaggcctggccttcggcgttcagcggctccttgctgccggtgatccagccccggcagttcagctcgccgcaatggcaagcgaactgccgggccagtgtgtcttcggtagtggcgtaatccagggtcagcaggctaccggcgtggatgggttgcaccgtccatagttccaggtacgtggtgtctagaaacacgttcgggttgcaggagtgctgtaacaggccgcagaaccaacaatcgtacaagtggatgcggggtgacagctgcagcgtgtgcgggcgacgttcgctcacggcataaccggaaacctgggcaatgcgcgtgcgactctcaaaggccacgcgggccgtgaccctggccgcaatcccttcagcctcttgcttgacctcaaagtgctcggtcgaggggtaaccctgttccacgagcagcgtcttgaagggatagaggccgtcattcacagccgttttagccttatccatggctcgagttttcatcactctcctgagcggggctgcatggacctgcgggtgtgacggccagtcttgcagcaaatgggcgcggccctagattcgccgaagtgggatccggtttctactgtcaaagttgacagtagaaacggtttttccccttaaagcgcgggggctgtgaccgtgggggcgggggcggcatttctcagctgtttcaactgtgccttgataggcgctgtggcgcacttggcgttggcctgctcgggcgtcaggtggcgcacggaggtgtagaacagctcacacgtctgctccttgcgcgtgacctgccacgtattcaggcaggccttgagcattacattggcatcgctggcgggcttctggcccatgccggcttgccagcaggcagcgctcaagtcctggcccatcactttcaagcccgcgtcgtcggctttttgttcgtcaccgtcatagctgtcggggctggccgcataccaaatgtagcttgggtggttggcgcccaataccgcgacggttttgcctggctccgggctgatctgcgccaggctcagcacgcccacggtttgcccgtattgttgcttgatccagctacgcaccggcgcgccgaaggccaccatcggcaatgcgccgccagggcgcaggctcagttccttgaccatgcgggtctggtagtcggtgaaatacccgtagacggtttccaggtctttgccggcattggacggcgcagcgatgggcgcgatatcaatgatggtctggtacgccggcgtttccgtggccggtacgccgttttcgcttaacaaggtggcccagcggtcggtggtggccgattccaggtaatcctgggcctgggtcagcgagtaatccggagggaagtgcaacagctcgatgcttttgcggttttccagggccatgcccaacggcaggaacaggtaccagttgtaggcccatttgccatcgctgttgagctggcgcgcaccttgataagccaggtcggcggtattgagcagcgtggtcagcggctggccgtaaccgtctggcacgccgctgaaggtcgccgtgacctgaccgtcgtgggtcttcacactgaccttggcccggctgtaaccgtcacgttgcaggctctggttcaaatagtgttcggcggtctgctccagtgaccatggccgaaagcagatcacattgcagttgttggggtacgcgaacaactgggtgacgcgctgcgtgctgcccagtggcacctcgatgtcggcctgtacgaccgtactcgccagcagtgcgacgagggtgaaggacagcctggtcagtttaaacatagtcgattccttgtcagcgaagcccgtctgcgcgggatggaagcccacctgcacacagtagcggctgaccaggaaaatcgcgtgttaaatcgcccggcatgtcgttattggataagcccctacaggctgaactgcaaggcattgctcagatcgcccatgggcttctggccgcgcgcgatcatcgcgtcatcacgctgcttgaggccgtccagggtctccaactggaacacccgggtgatcaaacgcaggatcgatgccgtgtcatacaccgtatggtccaccgtgcctttgcgcgcaaacggcgacaccaccagcgccggaacccgcgagcccgggccccagcggtcaccctggggcggcgccacgtggtcccaccagccgccgttttcatccacggtcaccaccaccaccatgtttttccattgcgggctttcttgcagcaccttcaaggcgcgggcgatatggcggtcgcccgaggccacatcggcatagccggcgtgcatgttcaggttgccttggggtttgtagaaactcacggcgggcagcttgccggcctgggcgtcggcgaagaaccggttggtgctcgactcatcgcccaaaccgccgtcacgcaggcgcttggcacgttctgccgggttttgcggcccttgctgcttgaagtaattgaacggctggtggtggtactggaaattcggaatcttggggatgccgccggagtccttgaactgctccagcgtggcttgccacgcaccggcgtaccaggcccagtcgatgttctttttcgacagcttgtcgccaatatgctcgtgggtttgcggcaccagcacattgggcaggtcgggcttggaataatccgggttttgcgggtcgcggatccaggtgggccagtagggtggggccagggtgtttacgccgtaaccgtccggtgtcagcgcgctggggccaaattgtggcgggccggtcatggcgctggccggggaggtgtccaagggcttgaggcgtgtgccgctggggtcatcgctttgcagcgtagcgatctgcgccttggccaccgactgcgcggcattgggataaaacggcgcggtggcgctgatcaggtactggtggttaaggaacgagccaccaaacgcgccctggaagaagttatcgcacagcacaaactccttggccacgtcccacaggcgcagggcataacggctttgagcgtaatggcccatcaccagcccaccggaatcgccccaggcgacaaaaccatcattcttgccgccgttgatctgcatctggttctggtagaacacgtgccacaggtcgcgggtcaccaggctcaatggcaggtcttcgccctgcgggccttggagggcgaacggcgcgttgggcaggctttcctggaattgcacttcgctggggtaagtcaccccgtccactgtttgtgggccgacctgcaacacaccgccccagctcggtggcagggcaggcaatacgctgccatcgcggtcgcgctgctggaagtccttggcggttaacgccgacagtggtctctccacgccggggaaatctgcaaataggttgttgaagctgcggttctcggcgtagatcaccaccacggtcttcacctgctcgcgcaatgccttatccaactcctgaggcgtgagcggccgcgtcacgggtgggctcggtgcttcgctggtattgccgcaggcactcaaggttgcacccacgcccaacaccgccgcaccgccgaggaatcgccggcggctggtgtctaccggcgttttgggggcgcagtcgtgggcagggtggtcgttgtgctcgtcactcattgcgaggaatccttggcgagatgttgcaagatatttcgcaggacggtagcaatggaatgtgacggaacgaagacaggcttgagagcgctacagaacaaattgtgggagggggcttgctcgcgaatgcgggttgtcagtcaacgaattcattaacgatccaccgcattcgcgagcaaccccgctcccacaccgaccgcgttatggcatgactggcggcagatacttcaacgtcgtccccaacgcccacagcaaaaacaacaccagcggcgtgtgcaccagcaactgcacaaacgaaaacccgatcagatcccgcgccttcaggcccagcacacccagcaacggcaacatataaaacgggttgatcaagttcggcagcgcctcggcggcgttgtagatctgcaccgcccagcccaaatggtactgcaggtcattggccacttgcatcacatacggggcttcgatgatccacttgccgccaccggaggggatgaagaatcccagcactgccgagtaaacgcccatcagcagggcgtaggtgtcgtgggaggcgatggaggtgaagaacgtcgagatatggtgcgccagagtctggccgtcgccacccttgaccacggtcatcagtgcggcaatcgagccgtacagcggaaactggatcagcacgccggtggtggtcggcaccgcacgggccacggcatcgaggaagctgcgcgggcgccagtgcagcagcgcgcccaccatgatgaacaggaagttataggtattgagccccgagatggcgctgatcgccggcttggtcgagaactcatggaacagccaaccggccgccagcaacgccagcagaatggtcagcaacgggctgtgttccagccattcgcctgggcgggtcggcgcctgcggcttgggcaggttgaaggccgggtcaatgccgcaggccttggcatcccgggcgctgttggggccaggcgcggtggcgtaggcgatgatcagcgacaccacgatcagcgccagcaacagcacgccggactgccacaaaaaaatggtctcggtgaacgggatcatcccagtgatcgacaggatcgacggcggcaagctggccgggttggcctgcaactgcgcggccgacgacgacagccccagcgcccatacggcccccaggcccaggtacgctgcagcgccagcggcgcggtagtccatgcgcaaatccgtgcgccgggccaatgcccgcaccagcaaaccgccgaacaccagggacaggccccagttaagcaatgaagccaccatggaaatcaacgccacccaggccaccgccgaacggccattcttgggaatgcgcgccaggcggtcgatcaacttcactgcgggcggtgaactggcgaccacgtaaccgccgatcaccacaaaggccatctgcatggtgaacgggatcaggctccagaacccatcgccaaatgccttggccgcttcggccggtgcggcgcccatgcccagggtcgccacggcgacgatgatcacggcgagggcggcaaacacccaggagtcaggaaaccagcgctcggcgaagttggagcaacgcagggcaaatcgggcatagcggctgtcttcgatagcatcggccacgagtctttcctcttgtagttattatggggtttggcagttttacggcatgttcctctacgtctattgatttgggaatgtagttatcttcaacgatcaatgaggaaaacaaatatatccgtcgcgattgccatcgatgggctcagctcataacctgcacgccattttgtttgcctgccgagcctgcacatgactgccaccttttccccacgggcgcagcgtttttcccgctccgactacaaaaccctgggcctggccgccttgggtggagccctggaaatctacgacttcattatcttcgtgttctttgcgctgaccctcagccaactgttcttccccccagaaatgcccgagtggctgcgcctgctgcaaagctttggcatcttcgtcaccggttacctcgcccgtccactgggcggcatcctgatggcgcactttgccgaccacctggggcgcaagcgcgtcttcagcctgagcatcctcatgatggccttgccctgcctgctgatcggtatcatgccgacctacgcgcaaatcggctatttcgccccgttgatcctgctggcgctgcgcgtgctgcaaggcgcagcggtgggcggcgaagtgcccagcgcctggactttcgtcgccgagcacgcaccgcgtcaccatcgtggctatgccctgggttttttgcaggccggcctgactttcggttacctgctgggggcgctgaccgccaccttgctcgcgcaggtcttcacccccgccgaaatcctcgactatgcctggcgctttcccttcctgctcggcggcgtattcggagtgatcggcgtatggctgcgccgctggctcagcgagactccggtgtttctggaaatgcaggcgcgtcgccaagccgccgccgaaatgcccttgcgcaccgtgctgcgcgaccatcgcgccgtgctgctgccggcgatgatcctcacctgcgtgctgacgtctgccgtggtggtgctggtggtcatcaccccgaccatgatgcagcagaccttcggcatgagccccagccacaccttcgccctgagcgccctgggcatcgtcttcctgaatatcggctgcgtcctcgccggcctgctggtggaccgcatcggcgcgtggcgcgcggtattggtctacagcctgttgctgccggtgggcattgcgctgctgtacgccagcctgatcgctggcggcgtgtggctcggcgcggcgtacgccgtggcgggcctgagctgcggcgtggtgggcgcggtgccgtcggtgatggtcgggctgtttccggcgcaggtacgggtgtcggggatttccttcacctacaacatcgcctatgcgctgtgggcaagtactacgccgttgttgttgatcgcgctgatgccgaccagcccgtggatctgcgtggggtattgcgtggtgatgggggcggtgggggtgggaaccacgatcgtctatcgtaatttaggctacgcgaactactaatttttttctgagtgtcaatactcaacctctccctcccatagccagatttttgctaataggagggggagatagtttttaatcttttgcttacggaattttagcttgttgcgggctccagattggtgttgtttcggcctggaaaaattcgatatcaaatccgaaaaattgattttttgctctcatcattgtctgctgattttctttgctgtcagcttttccgtagatactaatgaaaattttctccacttgagcttcctttatttcttcaaatatatggctgtcgttgtctgctatagaatggccatagataaagagtgtgccgtttaagtttctaagcttccgtaggcaataatttaagtaggggttgtgctctatccgtgcgcgtttttttgcatgggtcggctccgcaacaaacagggggaatttcccgtgctctaagttttctctgacttgatcaattatggggactccatcttccgtacatttatgtttttttataccggatacagtgtcataaatgtgcagtcccccatgaagaaagtggacctcctggttagtgccatgccctacccaggatgttgggtatctgaagccgtcatcagtggagtagcgctctggaggtaggttgtttttattttttgcccagtaaagcaataggtcataattcagtgtgaatatttggttgaatgaacatagaaactttcgtgcagtggtgtattgttcgtcagaaatattgctgggtagtggaggatgagtgtgggagatggcatttataagtgctgacttcagtacttcttgatctcgctttacagtttctatgagttgtgggttcgcttcgtaaatttctagtacaagctgcgtggaaaccagtcgcttcatgactttttcaaagtcataagtgttgagttgtttaaaaagttctttaagttgaagctctcgatctccgaaattagcagcttgaagcaggtacttatagttgaagatctggtggttccacgcttgagaaaaaccgtttgcgagtaataccgagggtttttggcccaaggggactgattgcatcgcgtcgttgtaggtgatcaccttcacgctccctgtgagtaatatttaagacacaataatttgcatgatgactatatgccattattcgctcgctgaggcaagacggtgtattacgagtgaggttaaagacccttctcctgacggtaggcacgaggacggcaaggtgcccagatcaacaacgccacgcctgatatagctcccccaacgcgtgcatgaacgattttggtgcgcccgaagctaacgaccctctggcgctcagatgacaattttgcaaaccatgcccgtggatctggcctatagctctatgatccgccccaccccaacccacgaggacatttcatgagcgcaggacacagccacgcccaagtacgcgccggccacgaacgcaagttatggatcgcgctggggctgaccggcagcttcatgctggccgaagtcatcggcgcttttatcaccggcagcctggcgctgttgtcggacgcggcgcacatgatgaccgacgcccttgccctggcgatttccctggtggcgatccaagtcgccaagcgcccggcagatcgcaagcgtaccttcggttatgcgcgcttcgagatcctggcggccgccttcaacgcattgctgttgttcgccgtggcgttctacatcttgtacgaggcttaccagaggctgcaggcgcccgccgaaatccagtccaccggcatgctggtgattgcgctgctggggctggtggtcaacctgatctccatgcgtctgctcagcgctgccagtggcgagagccttaacgtcaagggagcctacctggaagtctggagcgacatgctgggctccgtcggcgtgatcattgccgcgctggtgatcatgttcaccggctggggttgggttgactccgtggtcgcggccgccatcggcttttgggtattgccgcgcacctggacgttgctcaaggcgagcatgaatatcctgttgcaaggagtgccggagggcgtggatatcgagcaggtggagcagggcattcgcagtgtgcctggggtcaaggacgtgcacgacctgcacgtctgggccctcaccagtggcaagaacgtgctgagtacgcatctggtcgcggatgcgtcccagggcactgagcaacagatcctcagccgagtgacggagttactgcacgaacaattcgatatttcccacgccacgatccaggtcgagggcgagggttttcaacatgacgatcacgacgaagtgcatgcctgaacctggctaacggatttgtaatctttcgcccacggccctgataagtaccgaaagctacattgcccccgctgggaaatctcagcgacttcatgggcgtggaactctcgttatggcaatttccgttagaacactgttgggggcggcggcattggcattgtggatatccgcaaacgccgcccaggcacaacctctcaccctcgatgcagccttgcaaaccgccttcgccaacaacccggacctggcggccgcacaatgggaaattgacatcgcccagggcggtcgccagcaggccggcttgatccccaatccggtggcctcctgggacgccgaagacacccgccgccgcagccgcaccaccagcatcaagctcagccagaccctggaactgggcggcaagcgcggtgcgcgtatcgaagtggccagccgtgcccaggatgccgccgcgctgaccctggagcagcgtcgcaaccagctgcgcgccgaggtcatcgacagctactacggcgccttgcgcgcccaggaacgccttgacctggcgcaacgctccatgacgcttgccgaacgcggcctggtggtcgccaacgggcgcgtcaccgctggcaagtcgtcacccgtggaagccactcgcgcccaggtgcaagtgtccgaaattcgcctggagttgaaccgcgcccagatcggcctcactgacgcctaccgtcgcctcgccagcagcaccggcagcgccgccaccgacttccaggccgtcgctacgccaagcacttccgtgccggcgttacccgccgccgcgccattgctggctcgtcttgaacagactgcggaactgcgcctggccgaactcaacattgtgcagaacgaagccagcgtgggcctggaaaaagcccagcgcattccggacctggatgtgtccatcggcagccaatacgacgccagtgtgcgcgaacgggtgaacctggtgggcgtgtcgatgcccattccgctgttcaaccgcaaccagggcaacatcctcgcggccactcgacgcgccgaccaggcccgtgacttgcgcaacgccgccgagttgcgcctgcgtaccgaaacccgccaggccctggacctgtggcaaaccgcgaacaccgaagtgcgtgcgttcaaccagcagatcctgcccgccgcacaaagtgcggtagacagcgccacccgcggcttcgagatgggcaagttcaacttcctcgacgtgctcgacgctcagcgcactttgatcgcggcccgcacccaatacctcgcagccaccgcccaggccaccgaggcctgggttcgcatcgaacgcatttacggcgacctcgcccgcttttgatttttcctggagtctcctgatgaacaaaacacatggcatggcgctcgccgtcgccctgggcctgatgctatcgggcttcgcccacgccgaggaagaagagggcaagctcgaactcaccgagcagcagattcaagccgccggcatccaattggcccaggcgcaaccgcgcgccatcagcaccgtgctgacgctgccgggcgaggtgcgttttgatgaagaccgcacctcccacatcgtgccccgcgcagcgggcgtggtggaggcggtgaaggtcaacctgggccagtcggtgatgaagggcgaactgttggcggtgatcgccagccagcagatttccgaccagcgcagcgaattggcggccagcgaacgccgggtcgaactggcgcgcaccaccttccagcgcgagcgtcagttgtggcaggacaaaatctctgccgagcaggattacctgctggcgcggcagaccctgcaagaagccgaaatcgccctgaacaatgcgcggcaaaaaatgactgcgctcagcggcagcgcggtattggccggcggcaatcgttatgaactgcgtgcgcccttcgccggtgtggtggtggaaaaacacctgggggtgggcgaggtggtcagtgaaaccagcaatgccttcaccctctcggacctgtcccaggtgtgggtcaccttcggcgtgtttcccaaggacttgaacaaagttcgcgtgggcaagccggtgaaagtcagctcgacggaaatgggcaccgaagtgctgggcacggtggcctatgtcggcaacttgctcggcgaacagacacgcaccgccaccgtgcgcgtgacggtccccaaccccgacgacgcctggcgcccgggcttgttcgtggccgtgcaagtggccaccgatacctaccaggccaaggtgaccgtaccgcaaaccgctatccagaccgtcgaggacaaaccctcggtgtttgtgcgcacggcggacggctttatcacccgccatcttgaactgggcgtcagtgaaaacggctacgtcgaagtgcgcaaaggtctggaggccggcgcgcaggtggcgacggctggcagcttcatcctcaagtccgaactgggcaaaggctcggccgaacacgcccattgatcctgcgagtgattccccatgtttgagcgccttatccaattcgccatcgagcagcgcatcatcgtgttgctggcggtgctgttgatggccggtctcggcatcgccagctatcagaaactgcccatcgacgcggtacctgacatcaccaacgtacaggtgcagatcaactcggcggctgccggtttttcgccgctggaaaccgagcagcgcattacctttcccatcgagacggccatggccggcctgccgggcctgcagcagacgcgttcgctgtcgcgttccggtttgtcccaggtcacggtgattttcaaggacggcaccgacctgttctttgcccgccaactggtcaacgagcgtctgcaagtggcgcgcgagcaattgcccgacggcatcgaaaccgcgatggggccgatttccaccggccttggggaaattttcctgtggaccgtcgaagccgaggacggtgtgcgcaaagaggacggcacgccctacactcccaccgacctgcgggtgatccaggattggatcatcaagccgcaattgcgcaacgtgccaggcgtggccgagatcaataccatcggcggcttcgccaaggaataccagattgcgccagaccccaagcgcctggccgcttacaacctgaccctcaacgatctggtcaccgcgctggagcgtaacaacgccaacgtcggcgccggctacatcgagcgcagcggcgaacagttgttgatccgcgcgccgggccaggtggcgtctatcgacgacatcgccaacattgtcatcaccacctcggacggcacgccgatccgcgtgcgcaatgtggcccaggtcgacattggccgcgagctgcgcaccggcgccgccaccgaaaatggccgtgaagtggtgctgggcacggtgttcatgttgatcggtgagaacagccgcagtgtgtcccaggcggtggcgaaaaagcttgaggagatcaaccgctcgctgcccgaaggtgtggtggccgtcaccgtctacgaccgcaccaacctggtggaaaaagccatcgccacggtgaagaaaaacctcttcgaaggtgcgttgctggtggtggcggtgttgttcctgtttttgggcaacatccgtgcggcgctgatcacggcgatggtgattccgctggcgatgctgttcaccttcaccggcatgttcaccaacaaagtcagcgccaacctgatgagcctgggcgcgctggacttcggcatcatcgttgatggcgcggtggtgatcgtcgagaacgccatccgccgtctggcccacgcgcaacaccgtcatggccggttgctgacccgcagtgaacgcctgcacgaagtgttcgccgcggccaaggaggcgcgacgcgcgctgatcttcgggcagttgatcatcatggtggtgtacctgccgatcttcgctctcacgggcgtggccgggaagatgttccaccccatggctttcacggtggtgattgccttgctcggcgcgatgattttgtcggtgaccttcgtaccggcggcgattgcgttgttcgtcaccggcaaggtcaaggaagaagaaaacattgtgatgcgcagtgcgcgccgggtgtatgacccggtgctcaactgggtgatggtgcgtcggcccctggtgttcggcttggccgctttgaccatcgtcgtctcgggcctggttgccagccgcatgggcagtgagtttatccccagccttagcgaaggcgactttgcccaacaggcgctgcgtgtgcccggcaccagcctgacgcaatcggtacagatgcagcagcaactggaaaaaaccttgctggcccaagtgccggaaatcgagcgggtgtttgcgcgcaccggtacggcggaaattgcctccgacccgatgccgccgaatatctccgacagctacgtgatgctcaaacccaaggaccaatggccgaacccgaagaagtcccgcgaggcaatcatcgccgatatccaacgggccagcgcgattgtgccgggcagcgtgtatgagctgtcgcagccgatccagttgcgcttcaacgagctgatttccggggtgcgcagcgacgtggcggtgaaggtgtttggcgacgatatggcggtgctcaaccagactgccggggaaatcgccgagaccttgcaaaagctcaacggcgcctcggaagtgaaggtggaacagacctccggcctgccggtgctgaccatcaatatcgaccgcgacaaggccgctcgctttggcctgaatgtgggtgatgtgcaggacaccatcgccgtcgcggtcggtgggcgccaggccggtacgttgtacgagggcgatcggcgttttgacatggtggtgcgcttgtccgacacgttgcgcaccgatatcgacggcttgtcacggctgttgatcccggtgccggcgctggcgagtagtacctcggggcagttgggctttatcgccttgtcccaggttgccagcctcgacctggtgctgggccccaaccagatcagccgcgagaacggcaagcgcctggtgatcgtcagcgccaacgtgcgtgggcgcgatattggctcgtttgtcgaggaggccgaagccgccatcaccacccaggtgaaggtccctgccggttactggaccacctggggcggccagttcgaacagttgaaggaggcttctgaacgcttgcgcatcgtggtgccggtggccttgctgttggtgttcgggttgctgttcatgatgttcaacaacctcaaggacggcctgctggtgtttaccggcatccccttcgcgctcaccggcgggatcatggccctgtggctgcgcgatattccgttgtcgatttcagcgggggtgggctttatcgccttgtcgggcgtggcggtgcttaatggcctggtgatgattgccttcatccgaaacctgcgcgaggaaggccgctcattatcggtggcgatccacgaaggcgcgttgacccgcctgcgcccggtgctgatgacggcgctggtggcgtccctgggctttatccccatggccctcgccaccggcaccggcgccgaagtgcagcgcccgttggcgacggtggtgattggcgggattatttcttcgaccttgctgaccttgctggtgctgccggcgttgtaccagtgggctcatcgccgcgatgaagagaccgcctgacaaccgtgaaaacgccgcaatgtgcgggcttaccctctgtaggagcgagcaagctcgctcctacattgggcctaggctggcttcgaaggaaacacaaggctgaaccgcgtaaaacgtccagcctggctggtgacatgagcatgcccctgatgcaaatgcatgatcgatttcacaatggccagtcccagcccggtgccgccctctgcacgggtacggctgctgtcggcgcggtagaagcgttcgaacaggtgcggcaggtggtgcgcttcaatgccacgccctgggttgcccaccgacagcgatacgctctgctcgtaggtctccaccaacagcaacacggtagaggcctcgggtgtgtggcgaatggcattggagagcaagttggaaatcgcccgctggatcatcaggcggtcgcccgtcacccaggcatcgccacgcaggctcagggtgacgtgtttgtcttcggcactcagggcaaacaactccatcacgcgctgggcttcctgcgccagggacacctcggtgaatgaggcccgcgccgccgggtggctgacctgcgccagaaacagcatgtcgctgacaatccgcgccaggcgttcgagctcttcggtgctggactccagcaccgccttgtattcctgcggtgggcgttggcgcgacagggtcaactgggccttgcccatcaggttggtcagcggcgcgcgcagttcgtgggccaagtcgtcggagaactgcgagagttgctgcaccccggcatccaggcggtcgagcatcacgttgatgccgtgggccagttcacccagttcgtggggcaggttgtctacggacaagcgatgggtgaggtcttgggtggtgactttcgccgccacctggctgaactgcttcaacggcgccaggccacgttgcaccagccaccaggcacccatgccaatcagtatcaacagcagcggcagcgcaatcagcgtggcgcgcaggtaggcactgagcaacgcctgatcgtccatgcggtccagggacagcagcacccgcacacgttcaccgttggccaggcgcatcaagctggaggcactgagtatctggttgccgtagctgtcgacccaattgaggtaaccaagggtttcccgtggtttgaagtcagtgagcagcggttcctggggcttgctgccgacgttcagcagcacgctgttatcgggcgcggtgccgacaatggtcaggtggaagttgtcgtggcccatcaccaggtccatcagtgagtgtgggcgagcgcgaataccgtgggcatccaggcccagggccaggctgtgctggatctgttccatcttgctttccaggttcttgcgcgcgagtttttccagctcatgggtgagggccaggtaggccagggttgccagcagcagcaccaggcccgcgcccatcaggctgaccgtcaggcccaagcgcatcgacaggctgccggtcttcatgggcgtgcttccagcacgtagcccacgccacgaatggtgtggatcagcttgacctcgctctggtcatccaccttggcgcgcaggcggctgatggagacttccaccacattggtgtcgcagtcgaaattcatgtcccacaccagggaaataatctgcgtgcgggtcagcacttcgccggcctggcgcatcagtacttgcagcagggcgaactccttggtggtcaggtcgatgcgccgggcgccgcgataagcgcggtggcgacgcgggtccagttccaggtccgagacgcggaacacttccggctgtggaatgtgctcgctgcggcgcatcagggtgcgcacccgtgccagcagttcgggaaactcgaacggcttgaccaggtagtcgtcggcgcccatgtccaggcccttgatcttgtcagccagccggccacgggcggtgagcatcatcacgcgctgggtaccattgcggcgcaattcttccagtacttgccagccatccttgcccggcaggttgacgtccagaatcaccagttcataggcgtgttgcccggccaggtgcaggccgtcgatgccattggcggcgcagtcgaccacgtagccactttcgttcaggccctgttgcaggtagtcggcggttttctgctcgtcttcaaccacaagaatacgcatgggggggttacctcttgaattaggggagagaaggcgcccatgtccctatggcggcggttatcggagtaggaaaagtctgaaggctaaagtaacttcagggtcaactgcgaccatcggccgcatggagcagcaggcaaaaaaaacgccccaagcggggcgttaaaaattcatctctttccaaaggagctacacaaaagcttcagagatgaatgtgctcgggtgaataagttgaagcgagtatagaaagttccacttaacgagaagctgaggccaatattacaattctgataaccggctatttgtgaacagatgttagttaatcgcgagcgaatgtaagggctacaacacgaccaaggggtattcggcaatcagacgaacttcttccaggtctgactcgaacgcactggagcgcacggtggcctggcgcacgcgtagggacaaatccttcaaacgcccactttgcaccacgtacttggcctcgatatcccgttcccaacggcgttgatcggtcaaggggttgcccgctgcatcgcggcgcatatacacggcattggcgttgctgtagtcggcgccggtgcctttgccgtagcgggtcatgaacgacaggccgggaatgccgaacgcctgcatgtccaggtcgtagcgcaccatccatgagcgctccttgggcgcgttgaagtcgctgtactggatcgagttattgaggaagatcgagtctgactggcgcaggtagtcgaaatcatcgtcgccgttgttacgttggtgggacacggccaggctgtgggcaccgaccttgaccccgagcctggcgctccagatgttgttgtcgaactcgccgagccgtttctggccttcgtccacggccttgtagtagttgaagtcgccgaacaatgacatgtcgtcggtcaatgcgtaattggcattgctgccgaagtagtactggtcccaggcgtccttcaagcggctgctgtacaggctaaagcccaggtggctgttgagctgatagtcaccgccgaagtaggcgatccagggcgagtcgaccttgcctgcatagaaggtggcaaagcctttgttcatgccgctttcactgggctggctcatgccgctcaggcgcccgccttgcaggctcaagccttccaggctggtgttttgcagggtgacgccgcgaaagctctcgggcaacaggcgagagtcgccgtaggccaccaccggggtgagtgggaacacgtcgccggccttgatcaccgtgtccagcacgcgcagttttgccgcgccgccgattttgctgtagctgttttccggctggttgtcgctgttcaccgggagcacgccgaacgagcctttgccgccgctgcggccgctgcccgagtcaagcgtaaggccgtacatggcgaacgcgtccagaccaaaacccacggtgccctgggtaaaaccggattcgaatttgccaataaagccctgggcccaggcttctgagtaaccattgccagtggggctggactggcctttgcggtcatcgcggttgaagtagaaattgcgtgccagcacgttgatgcgactgccctcgataaaaccctcgggcttgtcctccaccgccatggcggccatgggcagtgcagccatcagtgaaaagggaagggtgtaatgacgaatgctcatgatgcgctcctcggtgatggcagttatcagcttcttatagaggcgggcgttcttattgatctggccctggctgatagttgcaaacgacggataacagctgcatggcgcgaagattacaattctggaaactaacggccatctaacaaataagtaatgttctggtgaacctggcgtcagggtgggttggttaatctcgacactgaacttttcagtcgaggaaaccgcaatgaacttttataaagtaggtgtggctgtattaacggctgtgttgtcatttggcgcgctggccgaagggggcggggatcgcacctttgccctgatgatggagcgcaatgagaaagccatggccgcctacgcgatcaaaaaaggcaagccggtgcccgaggtccaggcttaccgctatggcatggacctggacattgccaaggtcgtcaacgtgacgccgccgatccgctcgtgcaacgtcgtgccgtcgcgcatgacctatgaagactccagcggcaagctcaataccctggaatatcaggtcatgggcgtatgccgtaacaatggcggttgaaaatatagttcggcccagggctcaagcgctcttcagaaaaccccggcagcgccgatgcaagttagaacacccacctcacttgcctaacggtgccccatgttcaataccggcctgaagcaggagctgaccgctctgcgcgaagaattgtcgagcttgctccaggtgaaagagagcctggaaaacgaaatgctctgcctgacactggaccctgaaggccgtgtggagtgggccaatgccaacttcctgcaggaattggcttattcgttgagtgaaattgtcgggcgcgcgatcgaagacctggtgccagcccatgtgcgccaggacccgttccagctgcgcttcaagcacgcgctggcccgcggcgaacactttgccggcgccgtgcgcctgatgcgtggcaatggcaaagaggcctggttgcgctcaatcgtgcagccggtgcgcagctctgaagggcgcatcaagcagttttcgatgttctccagcgaccttacccgcaccatcgagagttcgcgtgaacatgaaaacctcatcactgcgttgatgcgttccaccgcgttgatcgagttcgacctggaagggcatgtgctcaccgccaatgaccgcttcctcggcgccatgggatacagcctggcgcagatcgaaggcaagcatcaccgtatgttctgtgaaccgcaggaatataacagtgccgaataccagcagttctggaagcgcctgaacgccggtgagttcgtcgccgcgcgcttcaaacgagtggacagccacggccgcctggtgtggctggaggccacctacaacccggtggtggatgccaatgagcgactgtacaaagtggtcaagttcgccacggtcattaccgagcaggtcaaccgcgagcaggcggtggccgaggccgccaatattgcctacagcacctctttgcaaaccgacgacagcgcccagcgcggcaccaccgtggtcacccaggccgtggacgtgatgcgcgacctggcccagcacatgcaacaggccggtgaaggcatcgaggcgttgaatgcccagtcccaagtgatcggcagcatcgtcaagaccatcagcggcattgccgagcaaaccaacctgctggcgctcaacgccgccatcgaagcggcgcgtgccggtgagcaggggcgtggctttgcggtggtggccgatgaagtacggcaactggcgtcacgcaccagcaaagccaccgaggaaattgtcggtgtggtgcgccagaaccaggacatggcccgcgacgcggtggccttgatggccgacgggcgggcgcaagccgagcagggcttggccctggcggccgaggcgggtactgtgatcgtcgagattcaagacggtgcgcaaaaagtggtgagtgcggtcgggcagtttgccaatcagctgtcgagctgacctgtggggcttgtgcttgaggtatcttaggtcttttctcgcttgcagagctgatcgaccatgagccctacgttccgtcgccccgtaccactgtccaaggcttaccgtttgctcaaccacgggccgaccgtgttggtgagtgcagcccacaacggccagcgcaatatcatggccgctgcctgggccatgccgctggatttcgaaccaccgaaagtcgcggtggtgctcgacaaggccacctggacccgccaactactggaaggcgccggcacttttgtgctgcaggtgccttgtgttgcgcaggctgatctggtgcagacggtgggcaatacccgcggcgttgaaaccgacaaattcgcagcctatggcctgcacactttcagcggtgagcacaccgaggcgccgatgctggaaggctgcgtggcctggctggaatgccgcttgctgcccgagccgcataatcagcagacctatgacctgttcctgggcgaagtggtcgcggcttatgctgatgagcgggtattcagtgatggccactggcattttgaagggcatgatgaactgcgcacgttgcaccatgtggcgggtgggaatttcctggccattggccaaccgattgtcgggcgccagctctgacagaggcgcaaagccacgaagatcaactgtgggagctggcttgcctgcgatggcatcacctcggtgtacctgatgtaccgaggtgtcnnnnnnnnnnnnnnnnnnnnnnnnnnnnnnnnnnnnnnnnctggcgcccgacaatcggttggccaatggccaggaaattcccacccgccacatggggtttatggtgtcttcaggttcgtggcatgcactcgagggtgcggtttactacggtcttggccatctccagcaagtgccatacggcatggattcgggcgcggtcgtggggttgcaggtgatcgcaacagtcccacaccgtggccgatgcgctgttgatcagatgggaaatatagagttgagcgtcttcgaagctgagttcttcattgacgactaggcaatccatgggtggatcgggaagtgctttggtcatggtgtaactcctgattaaggcagaagccggcccagtcgcgactaaacgaagggtggcggctgtacgcaggttagtcgaccggctaatcaggaaaatccggcgcacccgagggtgccctgcgcacagccaccataaaacctcatggaggaccatgcgcctgattagagtccgggcgactaaacccgatcactgaaaaggcagtgacggaccgaagactagccatcgattccaacaggcacaaggcggcggggattgtctcggaaacgtcctgcaatttaaagggacacggcttgctggccttttacaaaccatgaccaaatgccagtaacacgaccacatccaactgtgggagctggcttgcctgcgatggcatcaatagggtgcgcctgatacaccgaggtgtctgcatcgcaggcaagccagctcccacagtccaacccagcactcagcgtccgagcattttcacccagcgcgatggcggcatgccgtaggtgctgcgaaattggcgggtcatgtggctctggtcggtgaagcctgcggtcatggccgcatccaccaacgattggccctgggccaataagtggcgcaccaggtccagccggcgcatggtcaggtagcggtaggggctggtgccgaacaacacgcgaaaatcccgcgataacgcccagcggtcacggccggcgtggtcggctatttcatccagggtgatgctgcggcccagggcgctgtggatgaattcacgagcgcgttcggccgcgatgtagtcgaaggatttacggcggatgatggccccggacgcatcgctcagcgcgtgggccaggtcgaacagggcgtcttgctcttgcatcgggtctatcgggcaatcgaggctttgtagcaacacttcgctggcgcggtgcagccttgggtcggtggacaaaccgccggggataaacggcaacggctgcccaccgaggatctgctggatcagcgccggctccacataaatcatccggtacttgaaaccttcgtcgctgccggcgcggccgtcatgggtttcatccgggtggatcaccatggtggtgccgggcaggctgtgggtcgtaccgccgcggtaatgaaaactctgcacgccgaacaacgtgcgcccgatggcgtaggtgtcatggcggtgggggtcgaaagcgaagccggcaaagtacgcctcgatacggtccaggccgctggcgtggggcgcgcggtgcagccagtcgagggagtgggtggggttgcccatggtgacttgtcacaaaaggaggtggaaacacgttaactgagtctgcaccggttgtctgccggggtcttgtacgattgtgcaggtgttgggcaaggcacatctggtagcaaatcgctgaccacccgtggtaagaatccttactttcaacagtgaggccggttatgagcaaggtgcgggtagggattatttttggtgggcgttcggctgagcatgaggtctcgctgcaatcggcgcgcaacattgtcgatgcccttgatcgctcacgcttcgagccggttttgatcggtatcgacaaggccggccactggcacctcaatgacacctcgaacttcctgctcaatcaggaaaacccggcgctcatcgccctcaaccagtccaaccgtgaactagccgtggtgcctggcaaggccagccagcaagtggtggaaacctgcggccagggcgtgctggaacacatcgacgtgatcttcccgattgtccacggcaccctcggtgaagacggttgcctgcaaggcttgctgcgcatggcggacttgcccttcgtcggttccgacgtgctcggctcggcggtgtgtatggacaaagacatcagcaagcgcctgctgcgtgacgcgggtattgcggtcacgccgttcatcacccttacgcgagctaacgcggcgcgcacttcgttcgaaacggccgctggcaagctcggtgtgccgatgttcatcaagcccgccaaccagggttcgtcggtgggggtgagcaaagtcagtgacgaaaccgaataccgcgctgccgttgaactggcgttggggtttgatgagaaagtgctggtggagtccgccgtccaaggccgtgaaatcgaatgcgccgtgctgggtaatgaccagcccatcgccagcggttgtggcgagatcgtggtgagcagtggtttttattcctacgacagcaaatacatcgacggccaggccgcccaggtggtggtgccggcggatatcagccatgaagccagcgagcgcattcgccgcctggccatcgaagcgtttgaggtgttgggctgcgtcgggttggcgcgggtggatgtgttcctgacgccggacggcgaagtgctgatcaacgagatcaactccctgcccggttttactcgcatcagcatgtaccctaagctgtggcaggcggcgggcatgagctacagcgagctggtgagccggttgatcgagctggcgctggagcggcatgcggggcgcaagggcttgaagatcaaccgccagtgattggcccgaagcagtaacgccatcaggcgttactgagcacttcgcgaaaaacgtccggccttatggccgcaatatgcagtagcgaacgtgctgctccggaaggtgcgcgacgcccttgctcccattcttgaagggttcttactgacacgcccagaagctcggcaaatttgggttgtgagagccctgtcttgcttcttgcttcggcagcctgagtgacctcaacgtgctgcacggccccgtaacgtcccgctttgacatcctgaatggctgtgagtagttcttcgcctatattgcgtttggcgtcacgttccttcagttctttatcagtgagtggcatggttcatttcctttgcgattttgtacaggatatgtgccggaatattctccgtggcgctcttgccataaatcagtagcgcgacgactgctccgcactccagttgtgtggtgtagatgacccgcactgatccacttttaccccggccctccatgctccagcgtatctttcggcaacctcccgagcgcggaatgacatttccagcatcaggatggctggcgagaaacgccatgaagatacctttttcatcttcagtccaatagtcaggccattgcctgctgaagagaggggattctatgagagtgaacacgcgaaattctacgtctttgacgtagcctctggcaagaaagggcgggccagaaaatcgcaggtgagatggggctgctcaagaaggtttttatcgcaaaagatgacatggcactttgagttctggcgctccgcgtaggatttaaggcgtaagggtgcaggtctttttttataagcctgtacggatagatcaacaccttaatcacccaacgcctcaccttcacgccgagggtccgcgccaccactgagcgtcaccttgccctgggcatcccgtgtgcgcacgatggcctgcacgccgctggtcatctcgatctcgctcagggcgtggcccttgtccttgagcgcctgtttaagcgccgggctgaacagcccagcttccaactcggtagcaccattgcgactgccgaagttgggcaggctgatggccgcctgcggatcgagcttccagtcgagcatggccaccagggatttactcacgtactcgatgatctgcgagccgccgggggagccgacggtagccagcagttcgcccgagttgcggtcgaacaccaaggtcggcgccatggccgagcgtgggcgtttgcccggttgcacgcggttggccacaggctggccgttttcttcggggatgaaggagaagtcggtcatctggttgttgagcaaaaagccctggaccatcacatgggagccgaatgccgcctccaccgtggtggtcatcgacacggcgccgccctggtcgtccaccgccaccacttgtgaggtggagatgcgcagtggcgagcggtctggtgcgtacgccacctgaataccagcaggttgccccggcttggcgatgcccatgctgcgctcgccgatcagcgtggcgcgctgcgccaggtaactcggcgcgacgaggccggcgaccgggacgggggtgaagtctgcatcggccacgtacagcgcgcggtcggcaaaggccaggcgcccggcttcggcgagcaggtgcacggcctcgggtgtcggttcaagcccggccggcgaagcactcttgatcggagtcatcggggcgatggccaggcgcgggtcgcgggtttccagggcctgcagtgtcccgaggatctgcgccacggctatcccgcccgaggacggcggtggcatgccgcagaccttccattgtttgtagtcggtgcacagcggtgcgcgttgcttggcggcgtagcccttgaggtcggcctgggacaggctgccggcattgtggtggccctggaccttgcgtgcgatctcctcggcaatcgggccttggtacagcgcgtccggcccttccttggcgatgcgcttgaacacgacggccagtgccgggtttttcagcagcgtgccggtggcttttggcgagccatcggcattcaggaagtacgccgccatgtcgggcgattgcgcgataaagcggtcagccgcgatcaaactgtgcaagcgtggggaaatggcgaagccttgctccgacaagcgaatcgccggctcgaacagcttggcccatggcaagtggccgctctttttgtgcgccatctccagggcgcgcaatacccctggcgtgcccaccgagcgcccgccaatctgcgcatccgtgaacgccatcggcgtaccgtcgcccttcaggaacaagcgctccgtcgccccggccggcgcagtttcgcggccgtcgtaagcctgcacgttgtgcccatcccacagcatgatgaatgcaccgccgccgatgccggacgactgcggttccaccagggtcaataccgcttgcatggcaatcgccgcatcaatggctgaaccgccttgacgcagcatttcacgcccggcttcagcggccagtgggttggcggcggcggccatatggcgctcggcgtggcgggtgctcaggtcggtgcgatagcccgagcccagctccggggccggtggctgttcgttgaccggcgtgtggcaggcggcgagggccagggctgcggcgatgactgtcaggctgcgacgggaaatcaaaaacacgcgctgaactccgttcatagtgagaaggggctgttgtccttggggtactgctttttacaggtaaatcgtgccttgcatgtacagcacggccttgccggaaataatcacccggtcgccctggagttcacagcgcaactggcctttacgctgaccgccttgctcggcgctcaattgcgattttcccaggcgctcggcccagaacggtgccagtgaggtgtgcgccgagccggtaaccgggtcttcattgacgcccacattcgggccgaaccagcgcgagacaaaatcaaaccgagtgcttttggcggtcaccgcaatcccgcgtttaggcaggcccttgagccgtgcgaaatccggtgtgagggccgctacctgggcttcattctccaccagcacaatgtagtcgtcggtgccaaacacctcggcggtttcaagtcccagggcgctcaacatgccgtggggcggctcgcagcgttcgggttttttggctggaaaatccatcgctagctcatcaccgttgcgcgttacccgcaactcgccgctacgggtggcaaagcgcaacacctgcggggcgtccgccagctgatggatcagcacccacgcggccgccaacgtggcatggccgcacaggtccacctccacttgcggggtgagccagcgcaactcatagaagtcgccacggggtacgaagaacgcggtttccgaaagattattttcggccgcaatctgctgcagttgctcgtcgggcagccactcagtgagtgggcacaccgctgccgggttgccgccgaagggatggtggctgaaagcgtcgacttggtagatgtccagttgcatcggggcactccgtgtttaggggaggctggacactaacagtgggggtggggggcgtcaaaatacagttagggagttttttgcgcgcataaaaaaacggcctacctttcggtaagccgtttttagtacttggtggctacacagggacttgaaccccggaccccagcattatgaatgctatgctctaaccaactgagctatgtagccaagtggcgcgcattattcgcttggaacggcaatgcgtcaagcgtttttgttgaaaatttttctacgctttcaactgtttaagccaaagcgctgattttggcgacgggcggtggcgaatgcaccgtggatgaggggagtagaagaagctcggtgtctttgaaggtttactcggggccaagtccgacagtgttgggcagatatccctgtcgcccaacgcttgaccgactaattcaacttacgtgtgcagtggggggtgggtgacgcgcttgagctgttcgcgtgcccgtgacaggcgcgagcgcacggtgccgataggaatgtccagtacgtcggcggtgtcctggtagctgccgtcggtttccagcgaggcatacaacgtcctacgcatttctgtgggcaagtgatcgatcgcgctcagggtattttccagtctccggttgacctcgaattcccagtccaggctgtggctttcttcctgtccgtgccacagcgactcatcgaattcgcaatgtgcaggcttggcatataggcgtcgaaagtggttgcggatcaggttttgcgcgataccgcacatccaggtactcagcgtcgcggtaccactgaaacgctcgcgattgcgccaggcttccaagtatgtcacttgcaaaagatcatccgcgtcttccgggttgagtacccgtttgtgaatgaaacgtcggagttttttctgttggtcgtctgtcagatggagcatgaattgaggcgaactgccaccaaggtgagctaaggcttcaatagggatattcatgatttttccttaaggtagacgcagtcgaaatagtttcggcgtttacctcttttgcactgcctgtgccaaaggagaatctgcacataacccaatgatttatatatataaatactttaatttcgtggcgcttttgtgcagtaatttgcaaaaggcaccaggggcttgtgcgggttttttcaccttgttggaagagcgagtttcgatggaaccatctggacgggcctaaccacacattggcactctcttcctgtactggcctgcccatgaaagtcgaatctacccccgatgtgccaatgaccccgcgtgtggaactccccaccgttagcccggccgccaagcctgagccaggccaaggtatcgatgatcttttcctgcacttcagtcaggaggttgaatccagcagccgtacgttggacaaacgcaaaattggcgtacgtgtgcctcctgtccaggcgctcgcgcagctctatgagcagttggggcatccggcccaggaaagctttgccgcggtagcgcgtcgaatcaggctgcaattgctgatgcaacccagcatcgataagttgctggaggccactggcggtgatccggcgcgcaccttcgtggtactcaaggcggtgtgagagcaggccgaggccgacgtgcgcagctccgaagccgacctggcgcgggatgctattgccaagctggaggtccgtttcaaagggcagatacaggcgggcctgaatatcgccatggccttgcagacggcgggtggtgatccacaagagcgccaggcgctgcgcgcgctgtactacgccagtgtggtgacacggcaatccctggccaccatgatgcaggcgctgctgggcgtctacggtgacgaccgttttgcacatggcttgaatgtgatgtccagcgccctgacggccgacatcgccgcccatgtgtcctcagtgcctacggcaatgttgcgcaccttgctggtagggctgcgcagctgcagtgcattgagcggggtgttgtgcagctgtcgtgagctggtccagaaccttgcaaccgaactgcatgcggtaagcctgctgcaacgcctgctgggttatacaagtaccggcatcgtgacaaatgaagtcatgcgcctggccgaagatatgggggccggcacgacaacactcgtggcgctcaatgcgctttatccactgtttctgaaattgcccctggctttgtggccggatagccagtcacgccaagaggcgctgcacaactttctactggtgatggacgagcttgcccgcctcgaaggcataagccctggctttcctaattcgagtatcctggcgtgaacgtgctgtccaccgtcaacggcatactgctcaaggtagcgcagcgcgccgaggtcttgggcgccgtggtgatcatggccattgtgttcatcttcatcgtgccgctgcctacctggctggtggacattctgattgcgctgaatatctgtatttcctgcctgttgatcatgctggcgctgtacttgcccgggcctttggcgttctcttccttcccgtcgattttgttgctgaccaccatgtttcggctggcattgtcgatcgctacgacgcgcttgattctgctcgaacaggacgctggcgatatcgttgaggccttcggcaacttcgtagtgggcggcaacctggctgttgggatggtgatcttcctgatcctcaccctggtcaactttctggtgatcaccaagggctctgagcgggttgccgaagtggcggcgcgcttcagcctggacgcaatgccgggcaagcagatgtccatcgacagtgacttgcgtgccggcttgatcgacggtgggcaagcgcgcgacaagcgtgaacagttgtctcgcgagagccagctgttcggcgccatggatggcgcgatgaagttcgtcaaaggcgatgccatcgctggcttgatcattgtggtggtcaacctgctggggggattttccacggggatgttccagcacggtttgagcgctggcgattcgatggcgctgtattctgtgctgaccatcggtgatggcctgattgcgcagattcccgcgctgctgatctccctgaccgccggtatgatcattacccgcgtggcaccggaagggcgcaagggcgtcacgaacatgggcgccgagatcgcacgccagatgaccagtgagcccaagagctggatgatcgcctcggtggccatgctggtatttgcgatcgtgcctggcatgccgacgctggtgtttatcctgctagcgatgatgaccggcgccttgggttattacctcgaccggcggcgccgacgtgaagcgcagccagaagccgaagccgtcgaagccatgcggcctgaagaaaatggcaaagaggacctgcgcgggtttgatccgtcccggccttatctgttgcagtttccctcggccctgcgcggcacgcctgaggtgaccgatcttattcacggcatccgccaggttcgaaattccctggttgccaatatcggcctgacattgccgccgtttgaggtcgagatcgatgactcgctggccgatgatgaaatgcgcttctgcgtccatgaagtgccaatggtcaaggcgtctgtggtccagcgcgttgccgtagagcgcagtgccctgacggttgagcctgagcatggcataccgggattggccgagcgtaacgaacaggattggctctggctgccacctgacgacccactgctcaatgacacgcagttggagcgcttcaatgcgacgagcctgatcgtcgagcgcatgaagacggcgatgatgctcagcgggccgcagttcctggggattcaggagagcaaggcgatcctcagttggctggagaacaatcaacccgaactggtgcaggaactgcagcgcatcatgccgatctcgcgcttttcggcggtactgcaacgtctggccagcgaaggggttccgctgcgcgccgtgaggttgattgtcgaatcgctgatcgaatacggccagcacgaacgtgagcccgaagcactggcggactatgcgcgcattgccctcaagtcgcagatctaccatcagtacagcgaggccgatgggctgcatgcctggctgttgtcaccgcagaccgaaagtgttttgcgcgaggcactgcgccagacccagaccggggtgttctttgcactcgacaacgacaatagcgctgcgctgatcaacctgctcaaccaggccttcagtgcacgcgcaaaaataaaaagcgtgttgttggtggcgcaggatttgcgcagccccttgcgaaccttgttgcttgaggaattcaaccatgtaccggtgttgtctttcgccgagctggggagcaattccaaggtcaaggtgctggggcgttttgaccttggccaggatgagttgatgtacgggacattggcatgaacacatcgctacttgcagagtacgggggggcgtactgatgttcgaactccgagtgttggatggttcgcatcaaggggccgcgctgcctctgtttggtgagcaatggagccttggcgccaacgcgggcgccgacctcttgctggatgaccctggtgtcgccgagcaccacgcacgcctgttattgctcgaagggcgatggtcggtgcaggctgaagcggggctgctgaaaaacagcgatgggcaaatgttggcgcagatcggcgatctggcactcaacacgccgtttgtgattggctccgtcagcttgtgtgtcagccctgccgatcatccttggcgccaggcatcagtgctcaaaccgcctcagccggcaacggagcccttgccccaggcgccattgccgctgacgctgtcttccatttccgcgttgcagcaaaaacgcttggtcagcctggtgctgctatgcgccgtgatcatcgctgcggtcggcattatcttcagcggtgagcgcgaggcccaggcatcgctgatgccggcggtcattcagaaacctgggttggactcacccgctgaggtgcgccagcaactcgtgaggatgctcaacgagcgcgaattgctccagcgtgtcagcttgcagatcgtcaatggtcagattgccctcaatggtgttgtttcccaagatgaagtggaactgattgcgcgcatgctcgaccgttttgccgagcaattcgacactgtggtgccggtgatcagtcgcgtacgggtacgcgatgccaggttaccgttcaagatcttgcagatagtgggcggtccgaatggccacgtggtgcttgaagaaggaacccgcttattcgtgggtgatgaagtagatggtctgcgcctggttttgattgataacagcaaagtggttttcgacggcgagcaacgttatgaggtgggctggtgaaggggtcgctgcaggagcgtctggaggcctggcaactgaaccagtcacaggcgttgagcagtttcgcaccggtgacaatgcgcggtcgtattcagcgcgtgaacggcatgctgctgcaatgccgattgccgcaggcccgtatcggcgacctatgccaagtggaaaaaacaccaggcgactacatgctcgccgagatcatcgggttcgatcagcgcgatgcggtgctcagtgccctgggcaatctggaaggcgtgcgtgtaggggccagcgttgcgcggttgggggttccgcatcaggttcgggtcggtgatgagctgttgggacaggtgctggatggttttggtcgcccgattgcgggcgatggtgtgggcgcgttcgtggaagcggacacacctggggcgaccaccgtgttatgcgaggcgcctcttcctaccgaacggccgcggatcaaccgtgcactcgctacgggtgtgcgctcgattgatggtctgatgaccctaggggaaggccagcgtgtggggctgtttgccggtgccggttgtggcaagaccaccttgttggccgagatcgcccgtaacgtggagtgcgatgtgatcgtattcggtctcatcggggagcggggccgggagttgcgcgagtttcttgatcacgaactggacgagcagttgcgtgccaaggccgtgttggtgtgcgcaacctccgaccgctcaagcatggagcgcgcgcgtgccgcgttcacggcaaccgcgctggccgaaggtttccggcgtaagggccagcgggtgctgttgctgatcgactctctgacgcgttttgccagggcccagcgtgaaatcggcctggctgccggtgaacccttggggcgcggtggtctgccgccgtcggtctacagtttgctgccacgcttggtggagcgtgccggcttgacccgtgaaggcgtgatcacggccatctatacagtgctgatcgaacaggactccatgaacgatccggtggcggatgaggtgcgctctctgctcgacgggcatatcgtcctgtcgcgcaagctggccgagcgcggccactacccggcggtcgatgtactggccagcctttcgcggattctgagcaatgtcgccgagcccgtgcatatccgtgccggtacggcgttacgacgcttgctgtcggcttaccagcagatcgagctgatgctcaagctaggggaatatcagcccggcaacgatgcgctcaccgacctggcagttgacagtcggcaggcggtggatggctttctgcgccaggacttgcgcgaaccttcgccgcttgccgccaccatggatcaattggctgagttgaccgcccatgtcccattctgaagtgttaccgggtgaaatcgacaccctgcgacgtttgcgccgacaccgtgctgaccgcgccgagcgtgcgctgcgtgaggcaaaacgggcgcagcaagcgctggtcgagcacatccgggaggcgcaagaagtcctcgagcaaacccgcctggaagaggcccggcaatgcgccgagctgttgagtttgcaccaggggcaggtagtgacgttcaaggcgctgaaaaactggaatgccaaggagcggcaattatcggcgggtacccggcgtgaagaaggccagttgttgcaactcaaagagcagcagcacgagcaggctgcacaggtcggccacgcgcagaaacacgtcaccttgtgcttgcgccaggtggaaaaaatccaagagctatctaagttactgacgcaggagccgatatgaaacaggtttcagttagtccgcctgaacgtccgcgtccgcgtgagtctcgcgatgaccgtgcgcctgaattcggcgccctcgtgccttgggagcaaggacgattgttcgcccggttgtttaacgatgggggccaggacggcgggggatatggaacgtctctgaacgcaatcaaagcctcgggcgatgtcgccatgatcgaggcgttgaccgagcagttggcgccgcgaatgctcgtcggttcgcaatggccgatgatggcggtttttcacctgggccgcctgggacggatcaacgccagtgtccgccgggagcaggggagctggaatgtcgagctggacgcggagcaagacaacacggcgcgctggctcagtggcgtacgccaacaatgtgagcaacggctggcggcgagcctgcgccagcccgtcaatgtgtatctggcaaaatcggcgcaggcatgatgctgccacctctgatatttcccacattcaaagccgatattgcggttgcccggcagcggttggggcaagggttgtgtatgccgttcgaggtcgccgggtcgagaggcgagttgagaatggagcctggtactgctccggtgggtatacagccgctctgcttcgaaaccgcctgtggagtattggccttcagtgagccaggaccgcagttgagcttgatgggcgaatgcccggtgacgttcgcacaggccggcaacgatcccgacgcctggttctgggagttgtttcagcatcatctgagccctcaggtgcaagcgctgtttggttacctgcgtttgctgcccggcacccgccccttgaactttggttgtcgactctgcgtgacgctcggcgcctctcgcgtcacgggctatctgtggctgtctgtcgagagctttctggcgctatgcaaggcggggccgtggcggctcaaggctgagccaatgccggcgcagtttcagctggcggtggacgtaacgctcgggcgcctgcggttgtcgatgcaccagctgcgcagcttgcgtgccggtgacgtgctggtgcttgaacgagcctttttcagtgcgtcgggaaccggccacgtgcaggttggcaaacagcgtctggtgggctggatcgacgctggatccgggccgacgcgtcttacccttacttctatcgaggatatgtttgtggacgaggattttgcaacacagccttactcagggcatgaggatgaaacagcggtgatggatgtgttcgggcatgaacccttcgacgagctgagcatggcgctcaatgtgcggtgcggtacgctgaacctgaccctcggcgaattgcgcaaccttgcgcccggcgcggtgctgggggtcgcaggctacgcccctggcactgcggggctctactacggcgaccgccccctcggccagggccagttggttgaagtggacgggcggctggggctgcagatgactcgcgtgatcttttctcgatgagtagtttccagggaatagatccggtcgtcctggcaatatttctgggggcattgtcgttgatgcccatgctgttggtcgtctgcacggcgttcctgaagatcgtgattgtgctgatgatcacccgcaatgccatcggtgcgcagcaggtgcctccgggcatggccatcaatggtattgccctggcggccaccctgttcatcatggcgcctgtaggctatgagatggccgagatcgtcaaggtgtcgcccctggacctgaccagcgtgggcgcacttcagcagacgggaatggaggcgatcaaaccattgcgcaccttcatgctgcgcaacagtgacccggatatccttacccacctgttggaaaatgccatgcgcatgtggccggcacagatggcgcaggaggttcaacgtgaggacctgatcctgctggcgccggcctttgtgctgtcacagttgcaggcggggttcgaaatcggcttcctgatctatatccctttcatcgtgattgacctgattgtctccaatctcttgttggcgctggggatgcaaatggtctcgcccatgaccatttccctgccgctcaaattgctcttgttcgtgatggtctccgggtggtcgcggttgctcgacagcctgttcctttcctatctctgagtggcctatggaacccatcgtattattcaagcagggcatgttgctggtagtgatgctgacggcgccgccgctgattgtggcggtggtggtgggggtcatgacctccctggtgcaggcgctgatgcaggtgcaggaccagacgttaccctttggtatcaagctggtggcagtggggatcaccctgatcatgaccggccgctggatcggtgtggagttgatccaattgatgaacgtgacctttgacatgatcggtcgctcggccctgcactgaggtcttgcctgtgctgctatatcttgagtatttgcccagcctgctggtcgccatggcgcgtatctacccctgtgccttcctcgtggcggcattctgttttcaacatatacgcggcatgctgcggcacagcattgtgatggtcatggcactgctgcctgcacctgccattcacgtcatgctggcgggccaggaatactcggcgctgatgctcggtgggctggtcttcaaagagttggccctgggattattgctgggcgtgttgctgtccatgccgttctggctgttcgagtcggttggggcgttgctggacaaccagcggggcgctttggccggtggtcagctcaacccctcgcttggtccagacgctacgccagccgggcacttgttcaagcaattggcgatttttttgctgatggccagcatgggccttggggcgttgacgcaggtgatctgggacagctatctgctctggccaccgacggtgtggttcccactgcccgctgccgatggcttcgatgtatttgtcggcctgctgggcgataccttcatgcacatgatgctctacgccgctccctttattgcagtgctgctgttgctggagttcggcgttgccctgctgggggtctacagtcagcaattgcaagtgagtacgctggcgccgcccctcaagagcctggcgggtatcggagtgctgttgttgtattttgcgttgctgcaggacctgatcgtcggacgcatgggcttgcttaaagacctcaagcactccctgggcgtgtttttcgaggtctcgctgtcatgagtgattcgggggaaaagaagcaccccgcgtcagccaagaagctgcgcgatcagcgtaagaaaggccaagtcgcccaaagccaggatgtgggtaagctgctggtgctgacagccatcagcgaaatcgccttgttcaccgccgaaagcagcttgcaacgtttccagcagttgatgctgctgccgatctcgcgcctgtccttgcctttcccgcaggcgctggaagaagtgatggtcgaaggcttgatgttgtttttctccttcgccctgctgatggccgcggtggcgattatcacgaagctggtcagcagctggatgcagttcgggattctgttcgcaccggactccttgaagctcgacttcaatcgtctgaacccgctcagccaactcaagcaaatgttctctgtccagtcggtaatgaacctgttgatgagcatcgtcaaggcaacactgctgggcctgatcctgtacgtggtgatctggccttccctgggggtgttgatcaatatggccagcagcgatctgcaaagctacatcctggggttgatcgccctgttccgctatctgctgcatgcctgtcttgggttattgctggtgctggcgcttatcgacctggcgatgcagaagtacttctttgccaagcgcatgcgcatgacccaggtcgaggtcgtgaaagagtacaaagacatggagggcgatccccacgtgaaggggcagcgccgcgccctggcgcagcagttggcccaggaggagccgaaggtcaagctgcccaagctggaggagtccgatatgctggtggtcaacccgacgcactttgccgtggccttgtattaccgccccggtgaaacgccgctgcccctgctggtgagcaaagggactgatgacgacgctcgtgcgttgattgctcgcgccaaagcggccgatgtaccggtgatccagtgcgtgtggttggcccgtacgctgtatacgaacaagctgggggcgaccattcctcgtgaaactctgcaggccgtggcattgatctaccgcaccctgcgcgagcttgatgatgaggccaagcgtgaaaccctggaattgccggagcttgatctgcgttgatcagccccgggtacgcgcatccagggtttcaaggttggccaacgacaacattcggctgaggaggctgttgagcaggttgcgctgtggaggcagtgcatgccagatcaccagggcgtcctgtgcgtcaatgtagataaagcagccatcgaatgccacggcttgctcgaaacgccgctccagcacgttctgcaattgtgaagcttgcagtgcctcgcgagccacgtgcagggccagaccctgacgggttccggcttgcaggctgctggccgttacccccgggccaagtttcaggtgagcggcagagccgcccaccaggctgtcgaggaagacctggcgttcatcggccgggattccgtgggcgctcatcgttccagcgacactgtctgatagtccggacgttctccggctgggccgggttcgacgcgcatttgtggcggccaccagatcaccagcttgtccttggtcgattgcggacgtgagcaggagtcgcccttgcaggtgggcgtgcagccggcgacaagcagcgccgcgccgatcagggtgacgtacagcaagcgatgtttcatggcttggccttttgggttggagtgatcagggagggacgaggcacgctgatgtgttcatccttgaccaccggtcgcatggcgataaacacttctgcttcctcgcccggcttgagccaggcgcgcggccagacactcacggccagggtttgcgacgtactgcattccttttcgtcgatacgcacattgcggttgaactgattgcgcagcaccaccacggctacgttgtactgcgggccggcgtaccattggctgcgctcggtgttcagcgccagcaggctgcgggtgctgcacaaggtgttcaaccccaggggcatcggcgctaccttgaaggctttgggcacttgcccggtgaccaggtgcgccagggtactgataatgtcgctgcgcttgatcactggctggtgagggtcggagcgcctggccaggggggtaagagcggcttgcaattcgacctggtctgcctggggcaggtagcgtgacgggtcggcctggtcgccgataacgcgtggagtgaggataaatagacgttcgcgccgattgttctgtcgttcagtcgaggaaaacaacgccttgcccaatagaggaatatcacccagcaggggtaccttgctgcgcttgtcggtgctttcggtgacgtggaaaccaccgaccacgagcgagcgtttttcggccatgatggcttgagtgctgactttgcctcggcgtacatcgaagctgccgggagtagggttggcctcttcgaagttaccgtcctcgatatctaccaacagctgaatctgatggccaccacggctcgtgatgacgcggggcacgacctggaagctggtacccacggtgatcggtaaaatcgtagcgttctgccgaccgcgagtcaggtattgggtccggttgaaatcaattaccgcaggctggttttccagggtcaggactgatggattggacaccatggttgccaggcccttggcttccagcgcgcgtatctccgcgtcgaaacgaccgcggttttcaatggtcagttgagcgttgccggaaatcatgttggctgcgccactgaagcgactgttctgaaagccccatctcaccccgaactcacgcagttgcgtgcgctcgatgtcgaggatgatggcatcgatttccaccagtttgcgtgccacgtcgagttgagtgatcagttcgcgatacatggcctgccgttccggcacgtcataaatcaggatggcgttattgcgcaagtcggcttcgacgcggatacgggctgggctgaccggggcccgcggtgtgattgacatgcccgtatcggtcgagccgttcagcccggttgtcgcggtggagccgagcatttgccccagcaacgggttgctcaagcgtggaaccacgggcgtaatgaacgcgggttgggtgatggagcgttgagcctgtgccgaaaacgtcgaggttgagcgcggttccagaagccctcgtagcatggtggctacaccggggatggtgattttttcgttgcggtattccatttggcggtccgccgcgctggcgaacttcagtgggtagctcaacacgctctgtttttcatccgcggaacggcgctggctgctgaaacgcttgatctgttcgatgtaaactttcgggccggagaccagcacaacaccgtcttccggcaactcgccccagccgaaacgactgtcgagcaagcctatatcggtcagcgcttgcttgaggtccgcgatggtctcggaagagacttccaggcgtgcggattcttgctggtccagggtgctgatataaagggtgttgttgtacatgtaccattggaagcggtgctcaacccccagccggtcgagcaatgactgtggcgtattagcgcgtatcttgccgttgacgttaccttcgagcagcccctcgacctggagctgagtaccaaatgtctgggcaaaatcttccagcacttcgcgcactggtttgtgctgggcttcataagcgtaggccgtgtttttccattcggcagggattgctgccagcgcgctatccagtggcagcagccacccaggcagcatgatgagccaacaccaggcggcgcggtgggtcgaagcaggtacgtgagggcgcaagcgtttgtgcttgtcttttttgtcaggcatgggaaagtctctgattagtgcggtatcgagcgcagcgacgtgggtatgaatgtgcgtacagaccgcgcctggcgcgcgacgatggcacgccaggtatcgcgttggttgagaagggattcgagacacttcgccagctgttcgccgttccccatcgccacacattgaataagccaaagcgcaccggtggatggcgctaatgcaactgcgccgtgaaaatagctcaggctggggcctcccagacgcatccaggtgcgcagatgggctttgtcttcgcccgctttggtcaactggacctttaccagcagtctgttcgaaacgcgttgaacgatgatttcgtcttcgttctcaaacaaagtgagctgctcttcgtggccattcagccaactggtaaggagtgctcgcaacttactgcacgccatccagcgctgttttgagcagcgtatgcctggagcgcgtatgttcgtttagcgcgatgatagagagcttttgttgtttcatgaggtcgccgaagtattcgatatccgcatcgagcgcaatcggatctttataggctgtattgactcgcttgatatcagcctgaacttgcttcagtagatggtttttcaggtttccgtgaaagtccatgatttttactccagatgtgtctgaactgtgtggcgggttgtttgccaccagttccatcggcagacatttttttaaagatatcgcctgcctctaccgctatgtcctactcgcctgtaaacaatatttctcgcatcgaggcccagtcgatacgaaaatcgccttcatctgtttccagtagcagtgattgaggtttgatctggtcatcggggcgaagcttccagggtgtagagcccaaccgggccaaggcttgggctatctgctcatgctcgtgcgggtggcaaaccaaggttgccttgataggtggaatttgcgtcgctaccaactgtttgaccagtgccgaaagacgctttgggggcggcacttcttccaacaggcagtggaaggctcggctggcaatggatgttgcgtagtgttcgaggctgtcacacattgtctggcgttggcgcgcccacgcgctgagttgcgcgtgggcacgtgaccagaagtcgaggcgggcctgctcgagcatttcttcgcgatgctcagccgcctggcgcagcaactcttcagcttgagcctgtgcgctacccagcaactgcgcggactgaacgcaatcggcgagcatctcccgggtaatcaatacttttggctgcccgcaagcgccgttgtgcaattcgattttgcgtagggtcaacatagacaattgctctggcttgttgcagttaacgacgagttgtttcgctgcccgttgcttcgatacgccagacaatcgcctgccacagcgtattgagccggccatgcgcgtcgtcgagtggcaggtgagtggtttcaagcgcctgtacccggtcagggggcaagcgtagccgaagacgttgccagacagcaggctcaacccatgccctcagcaactgcagtgaatcactctccggctgcaacagcgtgtcagggtgcagcgccttggcgaggcgctcacaccacttgcggtgttcatcgtacaaggggctgtcgacgttgggatggcacgtaagctccagtagcgctatcgccagatcgaactgctcccgtgaagccagggccaaaccaagcaccgttgcacggggagggggaggcaggcacggctcgatgcccaacgctgcacacgccagcgcgggttggctgcgacacaaggcgggtaatgcatggtaagcctgagcgctggtcgcatccgggtgcgaaaactgccacggactggcccaccattgggcccaggccagatgatcactcattcggtagatgcgctggggcgacaggttcctgccttgatcgttggcctcgtatgcgccagaacagcgcagcgacgagcgtcagtatcgcgccgataaccaacaagctgacagtggtacgccaaaaaccgatgtcttcctcggggaccaggaacggaccgaaatagctcaggcgttgctgctcttggtaagccgctgccggcacaaaaaccaccgtgagcttctgcgcgttatccaatgcagtggtcatgccgggaatactactggataccatcctgcgtacgcgcgcccggatgctgtcgggctccagtcgcgggtcgtgcttgatgaacaccgaggcggaggcgggttggacgggttcaccgggagccacgcgttcgggcagcaccacgtgtacacgagcgacgatgacgccatcgatgtttgacagcgtagcctccaactcctgggacagggcgtagatataccgggcacgctcttccaacggggtagagatgacaccctccttgcggaaggtgtcacccatcgtggcacgggcgaccttgggtaatccgaccgcttccagtgtgcgaacggcgcggctgatatcggctgcattgacacgcaccacgacgccgtccttggcaggtactttctgcgcgcgtatgtgtttgtcagccagttccgcgatgacctcattggcatcctgctcggagagctggcgatgcagttcgacactttcgccgcagccgcccagtatcagcgtcagcgagaaaactaatccgatggatagaaaacgaatcattttttcctactgtaggttactgactttttctaggcattgcgcgcccttgccgacgcacttcactagggtttgggtcagcagtacggagtctgaaagatgagaggcatagttgacccgacttttctctttgaactcattgttgaagtccttgaggcctcgactcatgccatttttcgctttgtccaaatgctgcaaagcgtcggtcagggcattcgatgatgacgtggcggtagcccgttgcatcgagggttccaataacgagctgaaaaagtttacatcttcgccgtggtgcgtaggttgggcagggggcctgcgggctgtgaggccgttctgatattcgcgtaatacatcgaattcttttatctgcatatagacctcttggggaaccgccctttggtgacaaagagcggtaatgctatttagcgtatcgcgtcgatgttctttttctgctcagtgatcttgaaggcctcaatactgtccttcagggattggcgagccgcttctttcctttcttgtttaaggtcttcgttttcgccgccgccgccgccgaagctttggacagggggttgataggtttgtgcgttaacgctagaagtactcatagtgacactccaatatctaagaaatgatgtctgagtcttgatatatagttgcaatatttttgcttccaataggcactaaatatatcaggctcatccttatgtggttccggagcgaatatggttccagcttttacttgaagggtgtgtctggaaatttcttcggtggctgtggactgcgctgcgggctactgtatgtctagttgtttcatgcgatagtaaagcgttctcttcgccatccccaactctgcagccacctcgtccacacaataggtatgacgacgcaacgactcttcaatcagagctttctcgatttgttgcaggcgttctttcaggttgattggctcgtttgtaacgttcgagggtgagcttgataacggcaccaggcccagcacaaaacgtttggcagtggagcgcagctcacgcacattccccagccaagggtggcacagcaactgttggaccagctcgctgcacaggtttggggcgagacacttatagtgctcggcttcctcttgaatcatattcaggaacaacgggacgattcggtcacggcgattgcgcagcggaggcagattgatatttacgacgttaaggcggaaatacaggtcgcgcctgaaccttccctgctcgaccatctcatgcagggattgctgcgcagaggcgatgactcgcatgtctaccgggataaaccgggttgagcccagccgttccacaccccttgattccagtacccgtagcagtttggcttgcatggagagcggcatactgtcgatttcatccagatacaaggtacccagatgggcggcttcgataaaacccgcacgtgattgcactgctccggtataggcgccgctgttgacgccgaacagctggctctctgcgaggctttccgggatggcggcgcagttcacggcaacaaaatgacctcgtcgtcccgacaaacgatggatccgttgggccaaggtatccttgcccgtccccgtctctcctaataataaaatgtcgatatcgagcgccgcagtactcttgagcgtatgctcgatgtccaaggcttcaacagaggggaggtatgtctcatttgttattttgtaagaggctgacatagtccgggtactccactatcgctatcacttcactgttgatagaacgctgttggcgtacggccagtagaacgcaaataatcaaaaatgtcatcgtggctgtgagtatgaaaatgctgcgggagaatgtgtgaaagattaactatgtcagcgcgctgtattattcaagtgctttagtgtcggttattgagcgtttagtgtaggagaagacttaagggttgagggattcatcgttcaaatggatcgccggatctggatgattaaggtttctatgtagagggactttagttgagtggtagatagaaataggaggcaacaaaaaaccgacgcaatgcatcggtttcttgtatagggcagggtgttcagctaacgcttatacgttgaagcggaagtgcatcacatcgccgtctttaacaatgtagtccttgccttccaagcgccatttaccagcttccttggcaccggcttcacccttgaactggatgaagtcgttgtaggcgatcacttcggcgcggatgaagcctttttcgaagtcggtgtggatcacgccggcggcctgtggcgcggtggcaccgaccttgacggtccaggcgcgaacttcttcgacaccggctgtgaagtaggtctgcaggttgagcatttcgtagccggcgcggatcacgcggttcaggccaggctcttccaggcctagggcctcgaggaacatgtccttttcttcgccgtcgtcgagctcggcgatttccgcttcgatcttgttgcacaccggaacaacgatggcgccttcttcgtcggcaatggccttgaccacgtcgagcagcgggttgttctcgaagccgtcttcggcaacgttggcgatgtacatcacaggcttggtggtcagcaggtggaagcccttgatcacggccttctcgtctgcgcccatgttcttcatcaggctgcgcgccggcttgccttcggtgaagtgcgcgatcagttgctccagcaggcctttctggaccactgcatccttgtcgccgcccttggcgttacgtgcgactttttgcagttgcttctcgcagctgtcgaggtcggcgaagatcagttccaggtcgatgatctcgatgtcgcgcttggggtcgacgctgttggagacgtgaatcacgttctcgtcttcaaagcagcggaccacgtgggcgatggcatcggtttcgcggatgttggccagaaacttgttgcccaagccttcacctttcgaggcgccggcaaccaggcctgcgatgtcgacgaactccatggtggtcggcaggatgcgcttgggattgacgatggccgacagtgcgtcaagacgcgggtccggcatcggcacaatgccgctgttgggttcgatggtgcagaaggggaagttctccgccgcaataccggacttggtcagggcgttgaacagggtggatttgccgacgttgggcaggccgacgatgccgcaattgaatcccatggtgtttcccctcggtaagagtcaggccttctggctgtgcaggtttttcatcgcacggttccattcaccggcgaagatatccggcagcacgccgagggcaaaatcgatgctggcatcgagtttttcctgttcggcgcgtggcgcacgacccaggacgaaatttgaaaccatactggcaacgcctgggtggccaatgccgagccgcagacggtaaaaattattctgattgcccaactgcgcgatgatgtcgcgcaggccattgtgcccaccatgcccgccgccgagcttgagcttggctacaccgggtggcaggtccagttcgtcatgggccaccaggatttcttcgggtttgatccggaagaagcccgcaagcgccgcgacagcctggccgctgcggttcatgtaggtggtgggaatcagtagacgaacatcctgaccctggtgcgagaagcgcccggtcaggccaaaatatttgcgatcggccaccagattgatgccttgggcgtgggcgatgcgctcaacaaaaagggcccccgcgttatgccgggtctgttcgtattcggcgcctggatttcccaggccaacgatcagtttaatggcagtcacgacaggggcccttcctttggagttgtggataacatcgccgtacccaggtgcggcgaaagtggacgacactacatcatttactcaagagtaaacgccgcgttatcgcccgctttctcgctacgtttcggtccgcgatgtttcctcaagctccggcaatacagagtgaattactctgcagcgccttcttcagcttcttctggagcaacgcgtggagcgtgaacgttggcaacagctttgtcatcaccgtgagccagtgcaacaaactcaacgcctttaggagccttgaggtcggacaggtgaacgatggcgccgatttccagagccgacaggtcgacttcgatgaactcaggcaggtcttttggcaggcaggtcacttcgatttcgttcaggacgtgagagatctcgccgcctttcttgaccggagcttcttcacctacaaagtgcacaggcacgatggcggtcagtttttggccagcaacaacgcgaacgaagtcagcgtgcatgatgaactgcttggaagggtgacgctgcatcgctttaacgatgacgttctgcttggcgccgtcgacgttcagctcgataacgtggctgtaggcagcttcgttttcgaacagcttggcgatttccttggccaggatggtcacggattcagcaggcttgttaccaccgtagacaacggctgggatgttggcggcgtgacgcaggcggcggctcgcacctttccccaggtcagtacgcgcttgggcgttcagagtaaattcgttcatgttgtatctccaaaatagccatcatcgaggggcgtttgcgaccagcgccgaactcgatatgggcaaaaaagccccgccccagcggaatgctggggcggggcgcttttcgtcagtgaggtgatccgttggtttgacccttaacggaacatcgcgctgatcgattcttcattgctgatgcggcgaaccgcttcggcaacgaccggtgcaatatccagttgacggatacgtgcacaggcttgagctgcggcggacaacgggatggtgttggtcaccaccagttcgtccagcacggagttctcgatgttctcgatcgctcggcccgacagcacagggtgtgtgcagtaggcgaagacttttgctgcaccgtgctctttcaaggctttcgccgcgtggcacagggtgccggcggtgtcgaccatgtcatcaaccagaatacaggtacgcccttcgacatcaccgatgatatgcatcacttcagagtgattggctttctcacggcgtttgtcgatgatcccgaggtccacgcccagggatttggcaacagcccgtgcacgcacgacgccaccaatgtccggggacacgatcatcaggttttcaaagcgctggtcttcgatgtcatccaccagaacgggggagccgtagatgttatctaccggaatatcgaagaacccctggatttggtcagcgtgcaggtcaaccgtgagcacacggtcgatacctaccacggtcagcatgtcagcaacgactttcgcgctgatagccacacgagcggaacgcggacggcgatcctgacgggcataaccaaagtaagggattacagctgtgattcgagtcgctgaggagcggcggaaggcatcagccatcacgacgagttccatcaggttatcgttggtcggagcgcaggtcggctgaataatgaagacgtctttaccgcggacattttcattgatctcggctgtaatttcgccgtcggagaatttaccgacagagatgtcaccgagagggatatgcagctgacgtacgacacgtcgagccagatcggggttggcattccccgtaaagaccatcatcttggacacgcgcagtacctagaggctgagggtaacctggatgagtattagaaaatggcaggggcggctggattcgaaccaacgcatggcaggatcaaaacctgctgccttaccgcttggcgacgcccctgtatctgttgcaacgagtgcctaacactcggttccttttagagcagactttgcagcttgcgatgcaacatcgaaacgttgcttccttttgctacaaaccctgtaagggtctctgtaagaagggccgagactttatcagcttcagctttgcttgggaagcccccaaacacacaacttccagtgccggttaattttgcttcggtaaatttacctaacaaattcaaagcgttacgtacctctggataacgccttgctacaaccggtaagcagtcatttcgactgtttcccttgggaacggggcgcactttaatgggagaagagttacgtgtcaacaacggatctgaaaaaatttctgctgtacttacagatacttgcggcaccagcacgacataccaaggttcttcgggctctacaggggtgagtttctccccaacgccttcagcaaatgcggcgtgcccccgcacgaaaaccgggacgtcggcgcccagcgtgaggcccagcgcagcaaggcggtcgtggttccagcccagttgccataagtgattgaggcccagcaaggtggtggcggcatttgaactgccgccgccgatgccaccgcccatgggcaggattttgtcgatccagatatcaatgccaagtgggcagccggattgttcctgaagtttttttgccgcccgcacaatcagattgctgtcgtggggtacgccgtcgaattcggtgtgcagttggataacgccatcgtcacgcacggcaaaggtcagctcatcgccgtagtcgagaaactgaaacagcgtttgcaactcgtggtagccatcttcacggcgaccgaggatgtgcagcatcaggttgagcttggccggggagggcagggtcaatttttgtgcggacacgttattgccccagcttgcgcggttgccagtccttgatcaccagcgtgacgtcaaggtcggtgccatgcagcttgatacgttctggaagccagtagccgctttgttccacatagctcaaatattcgacctgccagccatcctgctccagtgtggcgaggcggctgtcgccattgaggctcagacggctcttgctgtccggcgccggcaagccgcgcacccaccagaccaaatgcgagacaggcaacttccagccaatctgctgctccagcagttcttccggggaggttgcctcgtagcggccctgattggccacttccaggcttacttgccctggcctgccagtcaggcgggctgcgccacgacccagggggcccgagaggcgaatgtcgtagtagtcctggcgttgcagccagaacagggtgccgctgccggagtctttcggcgcacgcaccccgaccttgccctcgatctgccagccatcgatgctgctgagctggtccttgtgttgtttccattgtgccgggttgccctggccttcaacggattcacggctgccgatgcccgcgcaaccggcgagcagggcgatgaaactgaaaacgataatgtggcgcaagaacataagcttaaagggtctcggatccggtcaggcgcttgatggtgctgcgcaggatagggctgtcgggttgttccttgaggaatttttcccagatttgtcgggcttcgcgctgcttgccattggcccagagcacttcgcccaggtgcgcggcaacttcctggtccgggaaacgctccagtgcctggcgcagcaagcgctcggcctcgtcgaggttgcccaggcggtaattcacccagcccaggctatcgagcacggccgggtcttcagggttgagcgcatgagcctgttcgatcagcaccttggcttcggcgtagcgtgtagtgcggtcggacaaggtataacccagggcgttaagggccatggcgttgtccgggtcacgcttgatgatcaggcgcaggtctttttccagctgcgccaggtcattgcgtttttctgcctgcatggcgcgggtgtacagcaggttcaaatcgtcggggtattgcagcaacgcctgttgcaacagtttccaggcgcgttcgccctgtttgttggccgataaggtctcggcctggatcaggtacagctggatcgcgtagtccggttcggcatcgcgggccgcggccaggcgtttttccgcttcgtcggtgcggccgttgctcatcaggatatcggcctggcgcaattgcgcgggcagataatcattgccggggccgacctgggcgtattcaagcagggccgcttgcgggtcgttgcgctcttcagcgatgcggcccaggttcaggtgcgccgagtccacgtggctgtcacgttcgatcagctcttgcaggtagcccttggcctcgtcccaggctttggcttccaggcacaccaatgccagggaataacgcagttcgtcgtcgtccgggtattgctggaccaggttggcgaactgcactttggcgtcttccatccggtcctgctcaaccagcatgcgtgcataggtcaggagcaggcgcttgtcgccggggtatttcttgatgcttttttccagcagcggaatcgcttccttaccgcggttaaggctttgcagcaggcgtgcgcgcaacaggatcggcgcgatttcgccttcttccggcgggttctgttccaggagtttgagcgcggcgtcagcttcatcgtcctgttgcagcagcagggccttgccgaaaatcaactgactgttcttagggtgcttttgcagcaggcgatcaaaactcttcatcaggccattgcgcgtgtcctggtcggtgtcggcggccgatagcgcaagaaagtcaaaatgcgtgtcgcccttgccctgcaaaaccttctccatatagaccatggagtcgtcatagcgcccggcacgcgccagttgcacggccgcggcgcgttgcgcttccaggtcatccggggcgtttttggcccagatcagcgaggtgtccagcgctgcctggtcggcgcccaggtattcggcgatgcgaaacgctcgctcggaaatccccgggtcctgggtattgatggcctgggtcacgtaattatccagcgcaatatcgaagcgattgcgctggccggccagttcagcggtcagcaggctgtagatcgtttcttcactgaacgaggaataaaccttgggcttttcaggggccggagtgctgtcttccaccggcgacgtagcgtccggcgacacgggggccatggcctggcagccgctgaggaagacaaaagcgaggagcaacgcggaagatctattcatataggaagaggacgactaacctgcggtcggatcatcatgacacaagccttcggccaaacataaccggggcactcggaatacgactattgctgccttttgcctttcctttgtaggagcgagcttgctcgcgaaaatcgtcaacgataatgcgggacgcctggcgctcagcggcgctctcaggtttttcgcgagcaagctcgctcctacaaaagtgcattgataggcataaggtatagggacaatagacgacggtggttgttctggatctttcgaagtaggacaattgtcggcttcccgacatcatcagcgatattgaatggccttcctcgcactcggtattaaccacaagactgcctccgtagacgtgcgcgagcgcgtggcgtttacgccagagcagttggttgaggccctgcagcagctctgccggctcaccgacagccgcgaagctgcgatcctttcgacctgcaatcgcagcgagctctatatagagcaggaacatctctcggcggatgtggtgctgcgctggctggccgattatcaccatttgagcctcgatgacctgcgcgccagcgcttatgtgcatgaagaggatgcggcagttcgtcacatgatgcgcgtggcggctggtctcgactcgctggtattgggcgaaccgcagatcctcggccagatgaagtccgcctacgccgtggcgcgcgaggccggcaccgtcggccccttgctgggccgcctgttccaggccaccttcaattccgccaagcaagtgcgcaccgatacggccatcggcgaaaacccggtgtccgtggcctttgccgccgtgagcctggccaagcagatcttcagcgacttgcagcgcagccaggccctgctgatcggcgccggggaaaccattaccctggtggcccgtcacctgcacgaccttggcgtgaagcgtattgtggttgccaaccgcaccctggagcgcgccagcattctggccgagcagttcggtgcgcatgcggtgctgctgtcggacattcccgctgaactggtacgcagtgatatcgtcatcagttccaccgccagccaattgccgattctgggcaagggcgcggtcgagagcgcgttgaagcttcgcaagcacaagccgatcttcatggtggatatcgccgttcctcgggatatcgagcccgaagtcggcgagttggacgacgtttacctctatagcgtcgatgatctgcatgaagtggtcgctgaaaacctcaagagtcgtcagggtgccgcccaggccgccgaggaaatggtcagcaccggcgccgaagatttcatggtgcgcctgcgtgaactggcggcagtggatgtgctcaaggcgtatcgtcagcagggtgaacgcctgcgtgatgaagagttgctcaaggcccagcgcatgctggccaacggcagcggcgccgaagaggtgctgatgcaattggcccgtggcctgaccaacaagctgcttcacgcccctagcgttcagttgaaaaagcttaccgccgaaggccgcctcgatgcgctggccatggcccaggaactctttgccctcggtgagggcgcgtcagacagctcttcggataaaaaaccgcaatgaaagcgtcactgctcaataaactggacgtgctccaggaccgtttcgaagaactgaccgccttgctcggcgatggcgaggtcatttccgatcaaaccaaattccgtgcttattctaaggaatacgccgaagttgagcccattgtggccacctataaaaacctactgaaagtccaggccgaccttgaaggcgcccaggccctgctcaaggacagcgacccggacatgcgcgaaatggccgtggaggaagtccgcgaagccaaggaaaaactcgctgagcttgagggtgacctgcaacgcatgttgctgcccaaggaccctaacgacgggcgcaacgtgttccttgaaatccgtgccggcaccggtggcgacgaggcggcgattttctccggcgacctgttccgcatgtattcgcgctatgccgagcgtcgcggctggcgcgtggagatcctctccgagaacgagggcgagcacggcggctataaagaagtcatcgcccgggtcgaaggcgacaacgtctacggcaagctgaagttcgagtccggtgcgcaccgcgtacagcgggtgccggccaccgaatcccaaggccgtatccacacctcggcgtgcaccgtcgccgtgttgcctgagccggacgagcaggaagccatcgagatcaacccggcggatttgcgcgtcgacacctaccgctcatccggcgcgggtggccagcacgttaacaagaccgactcggcgatccgtatcactcacttgccgtcgggcattgttgttgagtgccaggaagaacgttcccagcacaagaaccgtgcgcgggccatgtcctggttgtcggccaagttgaacgaccagcagaccagcgccgcggccaacgcgattgccagcgaacgcaagctgctggtgggctccggcgaccgctccgagcgtatccgcacctacaactttgcccagggccgggttaccgaccatcgggtcaacctcaccctgtactccctcgacgaaatccttgccggtggcgtggatgcggtgatcgagccgttgctcgccgaataccaggccgatcaactggcggcgataggtgactaaatgaccatcattgccagcctgctgcgcgccgctgacctgcccgactcgccgacagcgcgcctggacgtggagttgctgctggccgctgccctgggtaaatcgcgcagctacctgcatacctggccggaaaagatcgtcagcagcgaagatgccctgacgtttgccagctacctgcagcgccgccgcagcggcgagccggtggcgtatatcctcggccaacaaggtttctggaaactcgaccttgaagtggcgccgcacaccctgatcccgcgcccggaaaccgaactgctggtggaggccgccctggaattgctgcccgccacgcccgcccaggtcctggacctgggcaccggcagcggcgccatcgccttggccttggccagcgagcgcccggcctggcaggtcacggcggtcgaccgcgtgctggaggccgtggccctggccgagcgcaatcgccaacgcctgcaccttcataacgccacggtgctgagcagccattggttcagcgccctgcaaggccaccgcttcgacctgatcatcagcaacccgccctatattgccgacaatgacccgcacctggtggccggcgatgtgcgcttcgaaccggccagtgcgctggtggcggggcacgatggcctggacgatttgcgcttgatcattgcagagtctcctgcccacctgaacgacggcggctggctgttgctcgaacacggttacgaccaggcccaggccgtgcgcgacttgttgctgaaccagggctttgaaggcgtacacagccgcatcgacctcggcggtcacgaacgcatcactttgggacgccgcccgtgctgaccgaccaggagctgttgcgctatagccggcagattctgttgcagcatgtcgacatcgaaggccaattacgcctgaaacagagccgcgcgttgatcgtcggcctgggtggcctgggcgctccggtggcgctttacctggccgctgccggtgtgggcgagttgcacctggcggactttgacacggtcgatttgaccaacctgcaacgccagatcatccatgacactgacagcgtggggcagaccaaggtcgattcggccatggggcgcttgagggcgatcaaccctgacgtcaccttggtcgcccatcgtgctgcgctggatgccgactcgctggccgctgcggtcaacgcagtggacctggtgctcgattgcagcgacaacttctctacccgcgaggcggtcaacgcggcctgcgtaaccgctggcaaaccgttgatcagtggcgcggccattcgccttgaggggcaattgtcggtattcgattcccgtcgcgccgacagcccctgttaccactgtttgtatgggcacggcagcgacactgaactgacctgcagcgaagccggcgtcgtcgggccgttggtgggggtggttggcagcctgcaagcgttggaagccttgaaactgctggccggttttggtgagccgttggtggggcgcctattgttgatcgatgcgctgaccacgcgttttcgtgagttgcgcgtcaagcgcgaccctggctgcagcgtctgcggaacacaacatggttaagggcgcgcctatcggtgtgttcgattccggcatcggcggcctcacggtgctggaagaaattcagcaattattgccccgcgagtcactgctgtacgtggctgactgcgggcacattccctatggcgagaaaaccccggcgttcattctcgagcgttctcgctcggtcgctgagtttttccgcgagcggggcgccaaggcgttcgtgattgcctgtaacacggcaaccgtcgccgccgtcgccgatttgcgccaggactaccccgactggccattggtcggcatggagcctgcggtcaaacctgctgctgctgccacgcgcagcggtgtggtgggtgtgcttgccaccaccggcaccctgcaaagcgccaagttcgccgccttgctcgatcgcttcgccaccgatgtgcgagtgattacccagccgtgcccaggcctggtggagttgattgaagctggcgacctgaatagccccgccttgagcgccctgctgcaaggctatatcgagccgctgctcagcgctggttgcgacaccatcatcctgggttgtactcactatcctttcctcaagccactcctggcgcagatgctgccccccagcatcatcctcattgataccggcgccgccgtggcgcgccagctcaagcgcttgctcggtgagcgcgacctgctggccgttggcgaacctgaacctgcacagttctggaccagcggcgatcggtgtcacctaagaaatatcctaccgacactttggaaacatcctggagttgtgcgaagctttggctcgtgaaaatttcgtgaaataacactgaaaaaagctgaacttctggctatgcgtcggcttctatagcccgttagcctgtacataacccaattattccgtttgcaaaggacgtttcacatgaagcgcttgttctgtttggctgcgattgcggccgctatgttgggacactctgtttcagcccaggccaccggcctggagttcggcttgggcagcaccagcgattcgacgctgacctaccgcctgggcctgacctccgattgggacaaaagctggatgcagagcaatgtcggccgactgaccggctactggagcggcgcctatacctattgggaaggggatgaccgtgcgggcgccagcagcctgtcgttctcgccggtatttgtgtatgagtttgccggcgagtcggtcaagccctacatcgaagccggtatcggcgtggcgttgttctctcgcactcggctggaagacaacaacatcggccagtccttccagttcgaagaccgcctgggtttcggcctgcggttcaacggcgggcatgaagtgggcattcgtgccacgcattattccaacgccggcatcagcagcaataacgatggggtagagagctactcgctgcactacaccatgccgttgtaatgcactgtaggagcgagcttgctcgcgaagaacctcaacgataacgcagcgaatcaggtttaacgcggcgttctcaggtttttcgcgagcaagctcgctcctatagaatcagcggtaggccgtggtaatgccttcgcgctcttcaaggcattccggcgcccccatctcgaactcccggcaaatcagcggccgcagctcataaatcgtgcacatcatcgtgtcgcggtccaacgctgcgcaccagccgtcgtccaggcgcagcatcacctcaccgccccaatcgtcggtatcgataaagcgttgcggcacgccagtgtcggtgatcagcatgacttccagctggcagcaacaggccgcgcacgtcgagcaggtgacgggttcggtgatttgaatgtgagggatgttggtcataggcgcgcagtgtaaggcaagtgcgctagacgcgtatgaatgctcggacgggcgtcaatgctccagcctctgcgcaatcctgtgcaacagcggaaagagcatggcccataacagcgccaggccgatcagtgttgggatggtgccgtacccaaaactcacacccgccaattggctgccggcgtaataagacaacggcccgcccaccgcgcctagcaggctggccagccaccagggctgtgcgctccaggccaggcaatgccgcaaggtggtggccagcaaggcccataacagtatcagccacagcggaatcaatggccccggtgtattgaactcaaacacgcccagcccgcgcagtgccgtatcgaccagggtgcccagcaccgtcacggccagaatcacttgcccctctctggtccatgaacttatccacagaagatggacgcccagcgccgcgataccaatcagcagccaacggctatcgccgccgagcacgcagacaaaccagccgcactgaaacagcacggcattggccaggggtttaagcactgaaacgcccgagcagcggtggattgatcgccgccggtttggccagcagcaactgtgcggtgccgatggtgcgctccataaagccgccttcgcagtagcacaggtaaaactcccacaggcgcaggaagtactcgtcataacccagttccgcaagacggccatgggcgcggcgaaaattctcatgccacaggcgtagggtacgggcgtagtgcaggccgaagtcttccatgtgcagcaggttcatgtcggtgtcgcggctgacgatttgcagcatgttttgcacacaaggcagcgcgccgccggggaagatgtagcgctggataaagtcgacgctacgcttggcctgttcaaagcgctgttcacgtatggtgatggcttgcagcagcatcaagccgtcgggcttgagcaactgggcacattgtttgaaataggtgggcaggaaacgatggcccaccgcttcaatcatttcgatcgacaccagtttgtcgtactcaccggtgaggtcgcgataatcgctcagcagcaccgtcacttggtcttgcaggcccagcgcctcaatacgctgcgcggtgtaggcgaactgttccttggacagggtcgtggtggtgacccgacaaccgtaatgctgcgccgcatacaacgccatgctgccccagccggtgccgatttccagtagatggtcgctgggcttaagcgccagtttctggcagatgcgcgccaacttgttcagttgtgcctgttccagggtgtcatcgggggtcaggaactgcgccgccgagtacatcatcgtgggatcgagaaattcttcgaacaggtcgttgcccaggtcgtaatgggcggcgatgtttttttgcgagcctttgcgtgtgttgcggttgagccagtgcaggccctgagtgaacggccgggccaggcgagccaagccaccctccatggcgtcgagcacctccaggttgctgaccatcacacgcaccacggcggtgaggtcgggactggtccaataaccatggataaacgcttcgccggcgccgatcgagccattggccgccaccagcccccataccgccgcgtcgagaatctggatctcgcccagcaggtgcgcttcccgtgcgccgaagacttgccgctcgccatcctcgatgatcaccaactggccgtggcgcaattggctgagctggcgcaacacgcctttgcgcaatagcgcagcggtcatgccgttgacgttcaggcggttagccttgaccgataagctaggggatttcatggcggcgatccttggtatacccgactgcggtgcgagaggcgccatcggcggcctggtgggaaaaaatcggtgtgcgtttgagcagcaggcgcaaagcttgccaatagattgcaaggccggtcttggcggtcatccagggaaagcgccacaaatagcgatgcaggctggcgcggctcagtgcctgtttttccaggctcaaggtggcatcgaagactttttgcgtgccttgccaatcggccatgtgcacgccgagcctggcggcgggtgggctgaaactcatgcggtattccaggccgcgaggcaaaaacggcgacacatggaaggccttggccacggcgaaatgctggtgctcatcggcgcccagtgcctgggcgggcagcacgtagtgatagcgctcgcgccatggggtgttggtcacttcacacaggatcgcggccagttgcccgtcagcctcgaagcagtagaagaaactcaccgggttaaaagccaggccccaactgcgggcctgggtcagcaggcagatagcgccctggggtgtttgccccagggccttgccgacttcctggcgcacggcatcgctcaggctcatgccgtggcgcgtgaattcacgcaggtaatcctgctggcggaaaccgaaaggcgccaggcgacccgtgccggccagcggcgaaagccccagtacttcatcctcttcactgaggtccaggtacaacaggccgatgcggtagcgaaaggcgtgggccttgggcgtaaaccggcgatgggcgatccagccgctgtacaaggcgctgttcacagggtttccccaaaagcctgggccacgcgcagggcgctgaccacgccatcttcgtgaaagccgttggcccagtaggccccgcagtaaaaggtattgcgcacgccgttcacttcttcccagcgtgcctgcgccgccactgcggccaggctgtattgcggatgcgcgtaggtgtagcgcgccaggatcttcagcgggttgatcatcggcgtctggttgaggctgacgcaaaaggtagtggcgctgtcgatgccttgcaggatgttcatgtcataggtgacggcggcctgttgttgcacgttgcccgtcagccgatagttccagctggcccaggccagtttgcggtcgggcagcaggcgtgtgtcggtgtgcagcaccacgtcgttgtcggcgtagggcagggcaccgaggatctgctgttcggcctggctggggtcgtcgagcaaggccagggcctgatcgctgtggcaggcgaacaccacgcggtcgaaggtttcgctgccggccgggctgtggataactacaccttcgtcgctgcgttgcaccttatgcacagggcagttgagccgtatctgttcgcgaaagctgcgggtcagcggctcgatataacagctggagccgccttcgatcacgcaccattgcgggcggttgctcaccgaaagcaagccgtgattcttgaagaagcgcacaaaaaactgcagcggaaacttgagcatatcggccaaggacatcgaccagatggccgcgcccatcggcacgatgtaatgccggataaacctggggccatagccgccagcggtgaggtaatcgcccagggtcatgtcggcgctgatgcgctgctcttgcaagtccaggggcgcctggcgattgaagcgcaggatatcgcgcagcatgccccagaaccccggcgacagaatattgcggcgctgggcaaacagactattgaggttgttgccgttgtactcaaagccggtgctttggtcgcacaccgaaaagctcatctcggtgggtttgaacctgaccccgatttgctccagcaagcggatgaaattcgggtaggtccagtcgttgaacacaatgaagcccgtgtccaccgcatagcttttgccgtcgaccgtcacgttggccgtgtgggtatgcccgccaatgcagtcactggcttcaaacagcgtaatgtcgtggcgacggctgagcaggtaggcgctggtcagcccggcgatgccgctgccgataatggcgatcttcacaggtcgtccttcttcggtggcgggctgcgcagcatgcgtttgccgatgatcagttgcgcgcggttggggagcttcgacagcggccacaaggtggcaatgaacagggccggaaaggcgatttccagcgggcgtttttccagcttggcgaagatgtgtttcgcggctttgtcggccggccagctcaggggcatcgggaaatcattgcgctcggtcagcggcgtgtcgacgaagcctgggctgatcaccgtgacatcgatgttttccggcgacaggccgatacgcagggattcgaacaagtaacgcaggccggcctttgacgcgccgtaggcttcggcgcggggcatgggcaggtaggtcacggcgctggccacgcccaccagatgcggggtacgcccggcgcgcaacagcggcagcgcggcctcgatgcaataactgctggccagcaggttggtgcgcaccacgtgctcgatgatcgaggcgtcaaattgccgggcgtccacgtattcgcaggtgccggcgttgaggatcacggtgtccagtgaaccccagacctcgctgatacgctcaccgatctcgcgcacggtctggctgttggtcaggtcgccggccaccaccagcacctggcctggataacgaagggcgagggcatctagcgggccttgggtgcgggaactgagggccacgtgggcgccgctgtcgagcaactccacggccagcgcggcaccgataccactgctggcgccggtcagccagtaacgacggggcggtgtaaggctcatcccattctccttttcagccaacgaataacgcgacccagtagggggacatgttcatagagcagggcgccggcatcgaagtagtcgcgatggcggtaaaccttgtcgtgccacatcaaatgggaacagcctggcacctcgatcacctggccgccggccaggcgtgggtgacgaaaacgcatcgtccagcgcaggtagccctcgccttcggccacggtatcgaagccgtggaagtcaaaattcagctcgctgacgttgctgtacaagtcggcaaagtaacgctgcaacgctggcaggccctgaacttcatgcagggggtcggcgaaggcgacgtcctcgctgtacaggcggccgagcaggtgcaggttgtgcttgtccagcgtggcgaaggtgggggcgaactggcgcaggaagtcactcatgttcggccatctcctgacgcgaaggcagccggcgaaatgcggccaaggcgcgctcgcgagactgtttcaaatcgacgatggcacgcgggtaatccgccaccccgaacagtccgccagccgcttcggggttgtgcacttgttttttattcagcgcggccagttccgggagccagcgtttgatgaacacgccgtcgccgtcgaatttttccgattggctcagtgggctgaatatccggaaatacggcgccgagtcggtgccggtggacgaactccactgccagccgccattgttggccgccagatcaccgtcgatcaggtggcgcataaagaagcgctcgccttcgcgccagtcgattagcaggtttttggtcaggaacatcgccaccaccatgcgcaggcggttgtgcatccagccggtttccagcagttggcgcatggccgcgtcgatgatcggcaagccggtgcgcgcctgttgccaggcggccaggtcttcgggcgccttgcgccaggccagggcttcggtttccgggcggaacgcgcggtggcgggaaacccgtgggtagccgaccaggatgtgtttgtagaactcgcgccacagcagctcgttgatccaggtgatggcgccgatgtcgccgctttcgaactcgccctggttggtttgcagcgcggcgtgcaagcactggcgcggcgaaaccactccggcggccaggtaggcagaaagctgactggtgccgggcttggccgggaagtcgcgttcatccttgtaatagctgatctgctgatcggcgaaggcatcgaggcgacggcgcgcttcgtcttcacccgcgggccagagggcacgcaaggtttcgctgggtgttgggaacccttctactgccgtcggcacagggtcgctcttcacgccaggttcggcctgggcctttggcgtcggcaccacgcggggcagggcgctgtgcaggcggctgtagcagaccttgcggaactggctgaacacctgaaagtaggtgccggtcttggtcagcacgctgcccggctggaaaaacagttggtccaggtagctgtggaaggtcacgccgtcagcttccagggcctgggccacggcgctgtcgcggcggctctcgtgaatgccgtattcctcgttgacgtgtaccgactccaccgacagctcgcggcacagttggctcagcaccgtcggcgcctggtcccaggtcgcggcgtggcggattaacagcgggatgttgaggttgcccagtgcctggctcaggtgctgcaagttgcgcagccagaaatcgactttgcacggcgcgtcatcatgcgcctgccattgctcgggcgtgatcaggtaaacagccgcaacggggccacgctggctcgcggccgccagggcagtgttgtcgtgcaggcgcaagtcggtgcgcagccagatcagatgcattcagacaattccacgctggatcaataattgatgggccgacaacaggtcctcggccacggacaactcagggatgtcctgggttaatacgcccaactcggcgtggtggatgcacaccgttggtccggcaatcaccgtggggcaactaatgccgcccaacagtttgctgagtgccggcacctgcagggccttgctcgaatacagcagcaccgcacgcggttgcaggtgttccaccgccagggccagttcgccgaccggcagcggccaatcgaacacttccaccggacaatcggcactgctggccagccaggcgctgagccacaggtggggttccaggggcaggtcggaatgattgaccagcaacagcggcgcgccgtggagttgacgattgttgtgatagatccgtgcgccgaacttgctgcgcaaccaggacaggaagaacacccgctccatctgcgcgccgaactggccctgccagcgctgttccagctcgttgagcagcggcagcatcaattgctcgcacagggtgcgcggcgggtacagcgccatggcctggttgaacgcgtcatcgacccggcgctcggccagttcactgatggcactcaccaaatgctggcgcaggctctgccactcgttttccatcggctccgggctgccttgggcggagtcgatcagccctttgacctggctgaccggcacgccgcgattgagccaggtgagaatggcctggatgcgttgcacatgttcggcgctgaacaaccgatgccctttgggcgtgcgctggggcacgataaggccgtagcgacgctcccacgcgcgcagcgtcaccgcattcacgccggtctggcgcgccacctcgcggatcggcagccagccgttttccagggccagggcgaggtcttcgccgggttcgtcgagcagggcaggtttcatgggttagatcgcattacgcaggctgaggttttccgggtgcggttgcaggtaggcctgctgcgcgatgtagcggtccgggtgttggcgaaagtggtgcttgagcagggtcagcggcaccaccagtggcacgatgccgtggcggtattggccgatgacggtctgcatttcctgtttgtcatcggcactgatggcctgcttgaggtagccactgatgtgttgcagcacattggtatgggtaccgcgagtcgcgcattttttcaggcccgccatcagttcgctgaaatagccgtcggccaacgctggcaggtcaatgcctttgcccatgctgccgagcaagtggcccaggcttttgtaatgcgccgggctgtgggccatcagcaggtacttgtagcgcgagtgaaacgtcagcaagcggtgacgggtaagcccgtcggccattagttgctgccaactggcgtacacgaatacgcgggtgaggaagttttcccgcagcaccgggtcgttcagacgaccgtcttcttccaccggcaggttagggtgacgcgcacaaaacgcctgggcgtaaataccgcgcccgccaccgtcgacgggcgtgccgttgtcgcggtagaccttgacccgctccaggccgcaggacggtgacttctgcatgaagatgtagccgcacaggtcggtatgttcctgggccattcgctggccgtagtcgtccagtggctgcgtgacattgagcgcggggtttacgctgcccacagcctgcggatggtcggggtcaccgaccaggcggattgcttgccgaggaatgcccaggccgatggcaacttcaggacacaacgggacaaaatcgaaatagtcactgagggtctggctgcatagcagggactgtttatgaccgccattgaagcgcacgttctcacccagaaggcaggcgctgatggcgatcttcggtttcacatggctggacataagcaaacctctgcaagaatcctgtacaagctaaaaatcttgtacaactaaatctcatcataggctcgatgttgtacaagtcaaataatttgtacaggtttgtgcggccgcgttatttccagccgattttccagtcctcagcgtttttcaacgtctcccagggcaggcgttcagcgcgccgggtgaggatggcttgcagttcgatgtccagcaccgtgccctcttcgtcacggaacaactcggtgaccaggaagtgtttttccttgtggcgcggatgagctgccgtccattttgacagcagcagtttggcggggttgatgcggttcattgcaggtgctcgatcaagcgtcgtgccgcttcctggccactgagccaggcaccttccacccgaccggacaggcaccagtcgccgcagacgaacaagccgaggtcggcgtctgccagcacaccgaactcatggctgctcgatgggcgcgcgtagagccagcggtgcgccaggctgaatgacggcgcgggcatggcgctgtgcagcagttcggcgaaggcgccgtgcaggtgttcgatcaccgcttccttcggcaggtccaggtgggccttgctccacgcgctggtggcgtgcagcacccaagtgtcgagggtggtgtcgcgcccaggcttgctgcggttgcgcgccagccagtcgagggggctgtcttgcacgaagcagccttccatcggcgtatccagcggcttgtcgaacgccagggcgatggcccaggtcgggtccatttttaccccggcggcggcgctcgccagcttgggcgcggcggccagcagggcagtggcttggggcggcggcgtggcaatgattacatggctgaaagggccgtgattgccgccgtccgcgtcgagcaggttccaatgctgcgttccctggaagacttcggtgatgcggcaaccgaactccaccggcaagtcgtcgagcagggcgcgggtgatggcgctcatgcgcggcgtgcccacccagcggatctgctcatcgggggagggcgtcaattgcccggacttgaagttatacagctggggcttccactgctcggcccagccgttgctctgccagcgctgcacttcgttgacgaagcgccggtcgcgggcggtgaaatattgcgcgcccatgtccagcgcgccggcgtcgctgcgtttgctggacatgcggccaccgctgccgtggcttttatcgaagagttgcactgcatgcccggcgtcttgtagcgctcgggcggcggagagaccggcgatgccggtaccaatgatcgcgatgggaacagtcatgggaggcctcgttttaccgttgggtacagactacgccgacaccaatagctgtacaatattgttttttggtataagttttggcgtgcctgattgtgtggcgtgacctatggttaagctaaggcttaaacccccgtcacgctccattatcaaattgatccctgcttataaaatagaccagtgagcggcggcgaacgttacatgaggagagtcccatgcatattttgctgaccggcggtaccggcttgatcggtcgccaactctgcaagcactggctcgcacaaggccatcgcctgacggtgtggagccggcaaccggaaacggtcgcccaggtgtgtggtgcgcaggtgctcggggtggcgcgtttgcaagaggtgattggcgcggtggacgcggtagtcaacctggcaggcgcgcctatcgccgaccggccttggacccacaagcgcaaggcgttgctgtggagcagtcgcattcacctcaccgaaaccttgctggcctggatggaaagtctggagcagaaaccggcggtgctgatctccggttctgctgtgggttggtacggcgacggcggcgagcgcgaactgaccgaagccagcggcccggtgctggatgacttccccagccagttgtgtatcgcctgggaggaaaccgcccagcgtgccgaagccttgggcattcgtgtggtgctggtgcgtacggggttggtgctgtctgccgagggcggctttttgtcgcgcctgctgctgccgttcaaactggcgctgggcgggccgattggcaatgggcggcagtggatgccctgggtgcatatcaaggatcaaatcgccctgattgattttcttctgcacaagcaagacgccaacggtccttataatgcctgcgcgccacacccggtgcgcaaccgcgaatttgccaagaccctgggccaggtgctgcaccgcccggcgttcatgccgatgccggcatttgcgttgaaggttggcctgggcgagttgtccggcttgttgctgggtgggcaaaaggctttgcctgaacggctgcaagccgcaggtttcactttccagttcactgagttgtgtgcggctctggacgacttgtccagccgcctctaaagataggatgttgcatgaccgatcacgcgttgttactggtcaacctgggttcgccaaagtccacttcagtggccgatgtgcgcagctacctcaatcagttcctgatggacccttatgtgatcgacttgccgtggccggtgcggcgcttgctggtgtcgctgatcctgatcaagcgccccgagcaatcggcccatgcctatgcgtcgatctggtgggacgagggttcgccgctggtggtgctgagccgccgcctgcaacagcagatgactgcgcagtggacccagggcccggtggaactggcgatgcgttatggcgagccgtccctggaaacggtcctgacacgcctggccgcccagggtattcaaaaaatcacactggcgccgttgtacccgcagtttgccgacagcaccgtcaccacggtgatagaggaagccaagcgagtggtgcgcgacaagcaactgaatgtgcagttttcgatcctgcaaccgttctacgatcagcccgagtacctcgatgcgctggcggcgagtgtgcgctcttatgtagagcaggattacgatcacttgctgctcagtttccatggtttgcctgagcgtcacctgaccaagctcgaccctactggccagcactgcttcaaggacgccgattgctgcaagaacgcatcccccgaggtgcttgccacctgttatcgcgcgcagtgcttcagcgtggcgcgggacgtggccgcgcggttgggtttgccggagggtaaatggtcggtggcgttccagtcccgcctgggccgggccaagtggatcgaaccctacaccgaggcgcgccttgaggcactggcccagcaaggcgtgaagaagctgctggtgatgtgcccggcgtttgtcgccgattgcattgagacgttggaggaaattggtgatcgcggtcgcgagcaattttgtgaagcggggggggaggagttggtgttggtgccttgtctgaatgatgagccgcagtgggcggcggcgcttattacactgtgcgagcgggcgccggttgccttgtaatcgaggcctggggtgatccaattgtgggagctggcttgcctgcgatggcggcctgccaaccgacgcttctctacctgaccccccgcgatcaacctgtgggagcgggcttgctcgcgaaggcggcctggcagtcaacacagttggatagtgtacatatccattgctgcggtaacggccacctagggttccgctctgacagcggnnnnnnnnnnnnnnnnnnnnnnnnnnnnnnnnnnnnnnnngtgtacatatccattgctgcggtaacggccacctagggttccgctctgacagcgggtcacttttggaaggacccaaaagtaaccaaaaggtcctcgccccaccactcggcacctcgcctaggctcggtgtgcccgaaatccgccagtgatttgggcggctaaaccggcatccctgccggtttaccccccaaatccctgtcgaattccggccagcgtggtttgacggggcgcctgagatcaaaagcagatcaagatcaagagcggctcgcttcgcatcgtggttacctatggctatcgcaggcaagccagctctcacaatttgactgtatttacagattaagggtcaggctaaccgtgaagttgcgcggctcgccggggttgacccaatagttgctgtaggaccgctcgtagtacctttcattgaacaggttgttgaggttcagccccaccgtcacgttctgcgtggccttgtaatgggccagcaaatccacggtgtggtaggcgggcagttcgaaacctgtgccggcttcgcctgagcggtcacctacataggtgaacgctgcgcccaggtctgagccacgtaacgcgccgtcctggaattcatacacgcccaacacactgccgctgcgcttggccacgccgagaatgcggctgcccgtggggatggttttgtcgcccttggtcacttcggcgtcgatgtaggccaaggcgccgatcacgcggactgcgtcggtcacttgcccggttacttgcaggtcgaagccctggctgcgggccttgcccatggcgcggttgaggttggtcgccggatccagggtcagcacgttttccttttcgatatgaaaggccgcaagcgtagcgctgaggcggtcgtcaaacagctcgcttttgattcccacctcgtaacccacgccttcttcgggcttgaaggacttgccgccggcatccaggccgctattgggcttgaacgaggtggaggcgttagcaaacacgccgacttctggcgtgagctggtagagcaggccggcacgttgagtgaaggcgtcgtgggtttggcggctcttggcgtggttgcgggtgaagtcgtcggtgctttgttcgaagtgttccaagcgcgcaccgatcatgccgcgcaggcggtcggtgaagatgatctggtcttgcaggttcagcgcgtggcttttggtttgttcgaagaagtcggtgccggagcgtttgccgttgggtttgggctggccgtacaccggcttgtagatgtcgatgggatagtccccagcgatcgccgtcacacgctctttcttgcggtaatcctcgtattcggtaccgatcaacagttcgtgttgccaactgcctatatcgaacaccccgcgcagttccaactgggtgatgctgtcgtgccaaccggtggagcgttcacggtaacggcggttgacgctgtggccgtctgggttcagcgcacggctttccgaagcatcgccccacaggctgccctgtttgtaatgactggccagacgcagtttccaggcgtcgttgaggtggtgttccaatgccgcctgaatgcggttgttgtggttgcggatattgccgtcgttgggctcgccgaggaaggtggaatgggacatgccggtattggcgacgatgcctcggtcgaaggtggaggtgtgacgcacgaactcgctttccaccagcagggtggtgtccgggtccaactgccaactgaaggagggcgcgacgaacacgcgcttggcgtcgacgtgatcgcgaaagctgtggttgtcttcaacggccagattcacccgcgtcagcacacgcccctcgctgtccagcggcgtattcacatccagcgccgtgcggtagcggtcccaactgccggcgctggtctgcagcgtggtgaaggcctcgggctggggtttcttggtgacgatgttcaccgtgccgccgggatcgccacgcccgtacaggctggcggcggggcccttgagcacctcaatgcgttcgatattcgccgcgtccggggtactggggtaaccgcggttggcgctgaaaccatcctggtagaactcggacgtggtgaagccgcgcacgctgtattcgtagagggtcaggccgccgaagttgttttgcttggacacaccgccggcgaattccagggcgcgctccacgctggtactgcccaggtctttgagtaccgtggccggaatcacgctgatcgattgcgggatatcgcgcaaagccgtgtcggtcttggtcgcactggcagagcgggtggcacggtagccgtcgaccgggccggtggcggactcataggcgtcggaggtgacgctgatggtgtccagttccagggggttttcgtcggcgtaggcagggtcgagcagcaaacccagggccaggccggccaagggcacaaactttcgagacggcatgatagagcgttccaatagcgatattgaaacaatataacatgcctaatgagaatgaatcgctaagaaatatggccttacaagcgcccgtgaacgggcgcttgggtcgcgacggttattgctcttctttcactggcgcggtcgccggtggtgggcgcaggccgatttccgccgacagtttgatctccttgccgttgcgcatcaccaggatcgccaccttgtcggtcggcttgatccgagccacctggttcatcgacttgcggccatcacccgccggggcgccgtcgatgctgaggatcacatcgcccagttgcaggccggccttctgcgccgggccgtcgcggaagatccccgctaccacgatgcctggacgcccggtcaggccgaatgattcggccagttccttggtcaagggctgtacttcaatgcccagccagccgcgaatcacctggccgtgctcgatgatcgacttcatcacttccatcgccagcttcaccgggatcgcaaacccaatgccctgtgaaccgccggacttggaaaaaatcgcggtgttgatgccggtcaggttgccattggcgtccaccagcgcaccgcctgagttgccggggttgatcgccgcgtcggtctggatgaaatcttcgtagctgttaaggcccagctggttgcgcccggtggcgctgatgatgcccatggtcaccgtctggcccaccccgaacgggttgccgatggccagcgccacatcgcccacgcgcaaaccgtcggagcggccgagggtgatggccggtaggttcttcagatcaatcttgagtaccgccagatccgtttccgggtcgctgcccaccacgcgggccagggtttcgcggccgtcacgcagggccaccacgatctggtcggcgccggtggtcacgtggttgttggtgaggatgtagccctcggggctcatgatcacaccggagccgaggctggattccatgcggcgctgcttggggccgttgtcaccgaaatagcggcgaaattgcgggtcttcaaacaacggatgcgcgggcttgttgatgaccttggtggtgtacaggttgaccaccgccggcgcggcaatgaccacggcatcggcataggtcaccgggccctgcaccaccgtgttggtctgcggcgcctgttgcaggttcacatccagtgtgggcaggcccacccactggggataacgctggataatcagcatcgcgatcagcacgccagccaacaatggccatccaaaaaaacgcagtgccttgagcatcaagtaagtcctgacaggttgcagggggcgcgagagcgcccataatgtcgcgcattatacgaggctgcgacgcctgcgaacgggatatttaggagtcttttatggccgtgccccttactaccctcgtcgaggaagccgaccgctacctcggcagcgccaaaattgccgattactgccccaatggcctgcaggtcgaggggcggccccaagtgatgcgcatcgtcagcggcgtgaccgccagccaagcgctgctggacgccgccgtcgaggccaaggccgacctggtgctggtgcaccacggttacttctggaagggcgaaaacccctgcatcaccggcatgaagcagcgccgcctcaaaaccctgctcaagcatgacatcagcctgctggcctaccacttgcccctggacctgcacgccgatgtcggcaacaacgtgcaactggctcgccacctggacatcaccgtcgaaggcccgctggaccccggcaaccccaaagtcgtcggcctggtcggctccctggccgagcccctgtcaccccgcgacttcgcccgccgcgtgcaggacgtgatgggccgcgaaccgctgctgatcgaaggcagcgagatgattcgccgcgtcggctggtgtaccggtggcggccagggctatatcgaccaggcgattgccgccggtgtcgatttgtacctgagcggtgaagcgtccgaacagaccttccacagcgcccgggaaaacgacatcagcttcatcgccgccggccatcacgctaccgaacgttatggcgtgcaggcattaggcgactacctggcgcggcgctttgccctggagcacctattcatcgactgccccaacccgatctaaagcacagcactgaacactgtgggagctggcttgccttaatgccagtcagttaagcgtgcatcgccctctgtaggagcgagcttgctcgcgaaaaaccgcaacgataacgcgtgcttcctgaatgaacgcggcgcctatgagtttttcgcgagcaagctcgctcctacaaaagccttaactgactggcattatggcttgcctgcgatggcatcacctcggtcagcctaaatgagcacggcgcctgtatcgcaggcaagccagctcccacattggccgagttgagcgccaaactcggcggcatattcatatatcgtttcggtctagctggtgccctaaatagaagaagtcgctgtgctagcatgcctcgctcgaacacggcccgctggccgtccataagatcgtttttccgtgagtaaccatggtcgacaaactgacgcatctgaaacagctggaggcggaaagcatccacatcatccgcgaggtcgccgccgagttcgataatccggtgatgctctactcgatcggtaaagactccgccgtgatgctgcacctggcacgcaaggccttcttcccaggcaagctgccgttcccggtgatgcacgtcgacacccgctggaaattccaggaaatgtacaagttccgcgacaagatggtcgaggagctgggcctggacctcatcacccacataaaccccgatggcgtggcgcagaacatcaacccgttcacccacggcagtgccaagcacaccgatatcatgaagaccgagggcctcaagcaggcgctggacaagcatggtttcgacgcagcatttggcggtgcccgtcgcgatgaagagaaatcccgtgccaaagagcgcgtgtactcgttccgcgacagcaagcaccgttgggacccgaagaaccaacgcccggagctgtggaacgtctacaacggcaatgtcaacaagggtgagtcgatccgcgtgttcccgctgtccaactggaccgagctggacatctggcagtacatctaccttgaaggcatcccgattgtgccgctgtatttcgccgccgagcgcgaggtgatcgagaagaacggcacgttgatcatgatcgacgacgaccgcatcctcgagcacctgtccgacgaagacaaagcccgcatcgtcaaaaagaaagtacgtttccgcacccttggctgctacccgttgacgggggcggtggagtccgaagccgagacgctgacggacatcattcaggaaatgctcctgacgcgaacttccgagcgccagggccgtgtcatcgaccacgatggtgccggctcgatggaagataaaaaacgtcaaggctatttctaaggggctgtcatgtcgcatcaatctgatttgatcagcgaggacatcctcgcctacctgggccagcacgagcgcaaagagatgttgcgcttcctgacctgcggcaacgtcgatgacggcaagagcaccctgatcgggcgcctgctgcacgactccaagatgatctacgaagatcacctggaagccattacccgcgattcgaaaaaatccggcaccaccggtgacgatatcgacctggcgttgctggtcgatggcctgcaggccgagcgtgagcagggcatcaccattgatgttgcctaccgctatttctccaccgccaaacgcaaattcatcatcgccgatacccccggccatgagcagtacacccgcaacatggccaccggtgcgtccacctgtgacctggcgatcatcctgatcgacgctcgctacggcgtgcagacccagacccgtcgtcacagctacatcgcctcgttgctgggcatcaaacacatcgtggtggccatcaacaagatggacatcaacggctttgaccaaagcgtattcgagtcgatcaaggccgattacctgaagttcgccgaaggtatcgcgttcaagccgagcaccctggccttcgtgccgatgtcggcgctcaagggcgacaacgtggtgaacaagagcgagcgttcgccctggtacaccggccagtcgctgatggagatcttggagactgtcgagatcgccaatgatcgcaactacaccgacctgcgtttcccggtgcagtacgtcaaccgcccgaacctgaacttccgtgggtttgccggcaccctggcgagcggcatcgtgcacaagggcgacgaagtggtggtgttgccgtcgggcaagagcagccgcgtcaaatccatcgtcacctttgaaggtgagctggaacacgcaggcccaggccaggccgtgaccttgaccatggaagacgagatcgacatctcccgtggcgacctgctggtgcatgccgacaacgtgccgcaagtgaccgacgccttcgacgccatgctggtgtggatggccgaagaaccgatgctgccgggcaagaaatacgacatcaaacgcgccaccagctacgtgccgggttccatcaccagcatcgtgcaccgcgtggacgtaaacaccctggccgaaggcccggcgagttcgctgcagctcaacgagattggccgggtcaaggtcagcctggacgccgccatcgccctggacggttacgacagcaaccgcaccaccggcgcgtttatcgtgatcgaccgcttgaccaacggtacagtggccgcgggtatgatcatcgcaccgccggtgggtcatggcggcgcagcgcagcacggcagcctggcgcatgttgccaccgaagagcgcgccctgcgtttcggccagcagccggccacggtgttgttcagcggcttgtcgggcgctggcaagagcaccctggcctatgcggttgagcgcaagctgttcgacatgggccgtgcggtgttcgtactggatggccagaacctgcgccacgacctgaacaaagggttgccgcaggaccgtgccgggcgtaccgagaactggcgtcgtgccgctcatgtggcgcgccagttcaacgaagccggcctgctgaccctggcggccttcgttgccccggatgccgaaggccgtgaacaggccaaggcgctgattggtgcggaccgactgctgaccgtctacgtgcaggcatcgccgttggtgtgcgccgagcgtgacccgcaagggttgtacgcggccggtggggataacatccctggcgaatccttcccgtatgacgtgccgttgaatgccgacctggtaatcgacactcaggcgttgtcgctggaagacagcgtcaagcaagtgctggagctgttgcgtcagcgcggcgcgatctaaacctcgcagccatcaaaaagcccgccatcgatcactcggtggcgggctttttacatattctcaaatgtggactcgatcactgtgggagctggcttgcctgcgatggcggactgtcagtttatttattcttagctggtccaccgctatcgcaggcaagccagctcccacattaaatggcatgcacatgtagatcagcggctggccggaaagtctttgtgcagctgttccaacaatgcatccttgtcttgccacaactggttgatccagccctggaacgccagtcgatattccccatcctgctcataattcttgccgatgaattcggccggtatctgcacctcttcaaagtgcaccaccacgtccttcacgttaccgcacagcaaatcccaataacctgggcgcccggcggggtagtggatggtcacattgatcagtgacttgagctgctcgcccatggcatccagcacaaacgcaataccgcccgccttgggtttaagcaggtagcgaaacggtgactgctgctgcgcatgcttgcccggggtaaagcgtgtgccttcggcaaagttgaaaatccccacggggttgtcgcgaaacttcgcacaggtcttgcgcgtggtttccaggtctttgcctttcttctccgggtgcttctccaaataagccttgctgtagcgcttcatgaagggaaagcccagtgcccaccacgccaggccaatcacgggtacccagatcagctcttgcttgaggaagaacttcagggggcgaatgcgccgattgagcacgtactgcaacaccatgatgtcgacccagctctgatggttgctggtcaccaggtacgagtgctggtagtccaggccctcaaggccagtcaggtgccagcgcgtacggcgcaccaggttcatccagcccttgttgttggtaacccaggcttcatgggtgtggttcatcagccattcgctcaggcgcttggcgaacggcagcgccttgaacagcgccacgataaacaggaacgaacacagcaggatcgtgttcagcgccagcaacagcgaagcgatcaccccgcgtacggcggcaggtagaaaatccagcatttagatatccatgggtcggttggcggcttggatcgccgtcagggcgatggtgtacacgatgtcgtccacctgggcgccacgtggcaggtcattgaccggtttgcgcaggccctggagcatcggccccaggctcacgcaatcggcgctgcgttgtacggctttgtgggtggtgttgccggtgttcaggtccgggaacacaaagacggtggccttgcctgccacctggctgttgggcgccagttgccgggcgacgttttcgttggcggcggcgtcgtattgcaacgggccgtcgatcagcagcgagctttgttgttcgtgggcgagcagggtggcttcgcggactttttccacctcctcgccgctggccgagtcaccgctggaatagctgatcatcgccacccgtggcgtgatgccgaacgcggccgccgagtcggcgctttgcagggcgatttccgccagttccgcagcgcttgggtgcgggttcatcacgcagtcgccgtacaccagtacctgctcggggaacagcataaagaacaccgacgacaccaaggtgcagcccggcgcggtcttgatcagttgcagggcagggcgaatggtattggcggtggagtgaataacgccggagaccaggccatccacttcgtcgagggcgagcatcatggtggcgatcaccacggtgtcttccagttgttgctcggccatgggcgcgttgaggcttttgctcttgcgcaaggcgaccatcggctccacgtagcgttggcgaatcaggtcggggtcgagaatctccaggccttcgggcaggtcgataccctgggcgcgggcgactgcctccacatccgcaggcttggccagcagcacgcaacgggcaatgccgcgggcctggcagattgcggcggcctgtacggtcagcggctcgctgccttcgggcaacacgatgcgtttattggcggcctgggcgcgttggattaactggtaacggaacaccgccggcgacaggcgcatctcccgcggcgtgccgcaacgctggtgcagccagcgcgcatcgaggtggctggcgacgaagtcggtgatgatttccgcacgctcgcggtcatcgatagggatttccttgttgaggctattgagctggttggcggtgtcataggagccggtgctcaccgacaacaccggcaacccggcctggaaggcgcctcggcacagatccatgatgcgcgggtcgggcagggtgtcgctggtcagcagcagcccggccagcggcacgccattgatggcggccaggctgacggcgaggatgatgtcgtcgcgatcgcccggggtcaccaccaacacaccgggcttgagcagctcgacggtgttacgcatggtgcgcgcgcaaatgatgatcttggtcatgcgccggctttcgtagtcgccggcgttgaggatctgcgcgcccatcaggtcggccacgtcgcgggtgcgcggggcattcagctcgggttggtaggggatgcagccgagcagccggaaatcaccgctgcgcaacagcggcgaatgctctttgaggcgcgccgagaaggcttccatgctttcgtcggtgcgtaccttgttgaggatgacgcccagcactttcgggtctttgggaccgccaaacagttgggcctgcaattccacacggccggaaagctcggtgagcacttcattttccggcgccgagaccaggatcacttccgcgtccaggctcttggccaggtgcaggttgacccgtgccgcatagctggcgctacgggtcggtaccatgccttcgacgatcagcacgtctttgcctacggccgcctgctggtaaagggtgatgatctcttcgagcaactcatcgagctggccgtcaccgagcatgcgctctacgtgagccaagcccagaggctgcggcggtttcaggccgtgggtgcgtgccaccagctcggtggaacgttccggcccggtatcgccagggtgtggctgggcgatgggtttgaaaaaaccgactttcaggccggcccgttccagggtgcgcaccagcccaaggctgatggaggtcagacccacaccaaaatcggtgggcgcgataaaaaaagtctgcatgcgaattctctggaggtgcatggcttgggtggcgctctatgggtgagtgcctaccgcgaatcaggcgccaaggttatcgttattcgtgcccttgcgcacaccagccgcacgcaaaggcctggcctattttttcaaggcgttgcgcggggtcgagcacccaggcgcgtgactgccagggcggctggtggcgcaaatgctgggtgtggccgcaagacagctcgaccacccagtgcccatcgtcgtcctgatgaaaacctgtgatcgtgaccgttgatcggccccgtccgtccgggttccgttcgctttcgggcaaatccttgtttagacttgtccgttcttcattcttttgcaaaaggtctcgccccatgacgatcgccgctaacaaggctgtctccatcgactataccctgaccaacgacgctggtgaggtcatcgacagctccgccggcggcgcgccgctggtttacctgcaaggcgcaggcaacatcatcccgggcctggaaaaggctctggaaggcaagagcgtcggtgacgaactgaccgtcgccgtagaacctgaagatgcctacggcgaatactccgccgaactggtcagtaccttgagccgcagcatgttcgaaggtgttgatgagctggaagtgggcatgcagttccacgcttcggcgccggacggccaaatgcagatcgtcaccatccgcgacctggacggcgatgacgtgaccgttgacggcaaccaccctctggctggccagcgcctgaacttccaagtgaagatcgtagccatccgcgacgcttcccaggaagaagtggctcacggccacgtccacggtgaaggcggtcatcaccattgattgatgttttgatcaagtggtagcaaaaacgccccgactggttcggggcgttttttttgccctgggctcactgtaggagcgagcttgctcgcgaaaaacccgagacccccgctgggcgccaggcttcccgcgtcatcgttaacgatcttcgcgagcaagctcgctcctacagtttcaggcacacacaaaaatgccccggacctttcggtacggggcattttttaactgttacacagcctgagctgcgttgcagttgttaccacttaggctgcagcaggaacgctcagagccttgatgtggccattcaggcggctcttatggcgagcggccttgttcttgtggatgatgcctttatcggccatacggtcgataacaggcacagccagaacgtaagctgcttgagctttttcagcgtctttggtgtcgatggctttgactacattcttgatgtaggtgcgaaccatggaacgcaggctggcgttgtggctgcgacgcttctcagcctgttttgcacgttttttggcggaaggtgtgttggccaccgtcgagctcctcgaaagactttttaggaaatagcaaacaaaataggccgcgaatcatgccgatgacttgacgggttgtcaagggcggctgatgcgaactgctgagtggtcgatctgaagaggcgggtgatttatttccggcgcttgacctgtaaactcgcgagctttggctctgtgctgttgcaggcgcgcagtatcgcataagtgggcgcgtagttcgcctgctctttatctataggcgcaaactctttcaatgaatctgctcaaatcgttggctgccgtcagctctatcacaatgatctcccgggtattggggtttgtgcgcgacaccctgctggcacgcatctttggcgccagcatggccacggatgcgttctttattgcctttaaactgcccaacctgctgcggcggatcttcgctgagggcgcattttcccaggcgttcgtaccgattctggccgaatacaagacccagcatggcgaggaggcaactcgtacgttcatcgcctacgtctcgggtttgctgacgctggtgctgatgctggtaaccgtcgtcgggatgctcgccgcgccctgggtgatctgggccacggcgcccggttttgccaatacgccggaaaagttcgcgctgactactgatctgctgcgggtgacctttccttatatattgctgatttccctgtcttcgctcgccggggcgatcctcaatacctggaaccgtttctcggtaccggcttttgtgccgaccttgctgaacgtcagcatgattatgtttgcgctgttccttacgccgtatttcgatccacccgtcatggccctgggctgggcggtcctggccggcggcctggcgcagttgctgtaccaactgccccacctgaaaaaaatcggcatgcttgtactgccgcgcttgaacctcaaggattccggcgtctggcgcgtgatgcgcaacatgctgccggcgatcctcggggtgtcggtcagtcagatttccctgatcatcaacaccgcgttcgcctcgttgctggtgtccggctcggtgtcgtggatgtactacgccgaccgcctgatggaattgccatccggtgtgctgggcgtggcgttgggcaccatcctgctgccgaccctggcgcgtacctacgccagcaaggaccgccaggaatactcacgcattctcgattggggcctgcgcctgtgctttttgctggtgttgccgtgcgccttggccctgggcatcctcgccgagccgttgacggtctcgctgtttcaatacgggcagttcgacgcccatgacgccttgatgacccagcatgcgctggtcgcctactccgtgggcctgcttggtattatcgtgatcaaagtgctggcgcccggcttctacgcccagcagaacatccgcaccccggtgaaaatcgcgattttcaccctggtcgttacacaattgctcaacctggtgtttatcggcccgctggcccacgccggcctggccttggcgatcagcgcgggtgcgtgcataaacgcaggccttcttttttaccaattgcgtaaacaacagatgtaccaaccacagccaggctggggcgtgtttgcgttcaaactgctggtggcggtcgccgcgatgtcggttgtgctgtttggcctgatgcacatcatgccggcctggggccaaggcaatatgctggagcgcttcatgcgcctgggtgtattggtagtagcgggcgtggtggtgtacttcggcatgttgctgttgcagggttttcgcctgcgcgatttcaatcgcaagtcgctggggtagcgagtttgccgtgataaaacggttgttttatcgattcgacccatttggcctgcgctgttgcctgtcgtccggggctgggtgtggttataatcgaccactttatgagcaagaagcgcgttatgcagctggttcgaggtctccacaacctgcgccccgagcaccggggctgcgtcgccactattggcaactttgacggtgttcaccgtggccaccaggctatcctggctcggttgcgcgagcgtgcggtcgagttgggcgtgcccagctgcgtggtgattttcgaaccacaaccgcgggagttctttaccccggaaacggcgccggcccgcttggcgcgcttgcgggacaagttgcagctgttggcggaagagggcgtggaccgtgtcctctgcctggctttcaaccagcgtttgcgcagcctcagcgccgccgagttcgtcgaccgcatcctggtggacggcctgggcgtgcagcacctggaggtcggcgacgacttccatttcggttgtgaccgggtcggggatttcgatttcctgcagcatgccggcgtcaaccagggtttcactgtcgaagccgcgcaaaccgtcgaactggacggcctgcgcgtgagcagcacccaggtgcgtaacgccctggccgccgccgacttcgacctggccgagcgtttgctcggtcgcccgttccgcattgccgggcgggtactgcacggccagaagctggcgcgccaactgggcacgccaaccgccaacgtgcaactcaagcgccgccgtgtgccgctgaccggggtttacctggtgagcgtcgacatcgacggccaatcgtggccaggagtcgccaatataggcgtcaggcccacggttgcaggtgatggcaaggcccacctggaagttcaccttttggattttgccggtgatttatacgaccggcgtttgacggtggttttccaccagaagctgcgtgaagagcagcgtttcgcctcccttgaggcgttgaaaacggcgatcaatgcggatgtcgccgccgcccgtgcactagccgcacctagcgcccatcgctaaccgaagagccttaaatgaccgactataaagccacgctaaaccttccggacaccgccttcccaatgaaggccggcctgccacagcgcgaaccgcagatcctgcagcgctgggacagtattggcctgtacggaaagttgcgcgaaattggcaaggatcgtccgaaattcgtcctgcacgacggccctccttatgccaacggcacgattcacatcggtcatgcgctgaacaagattctcaaggacatgatcctgcgctccaagaccctgtcgggcttcgacgcgccgtatgtcccgggctgggactgccatggcctgccgatcgaacacaaagtcgaagtgacctacggcaagaacctgggcgcggataaaacccgcgaactgtgccgtgcctacgccgccgaacagatcgaagggcagaagtctgaattcatccgcctgggtgtgctgggcgagtgggacaacccctacaagaccatgaatttcaagaacgaggccggtgaaatccgtgccttggccgaaatcgtcaagggcggtttcgtgttcaagggcctcaagcccgtgaactggtgcttcgactgcggttcggccctggccgaagcggaagtggagtacgaagacaagaagtcctcgaccatcgacgtggccttcccgatcgccgacgacgccaagctggcccaggcgttcggcctggcaagcctggccaagccggccgccatcgtgatctggaccaccaccccctggaccatcccggccaaccaggcgctgaacgtgcacccggaattcacctacgccttggtggacgtcggtgatcgcctgctggtgctggccgaggaaatggtcgagtcgtgcctggcgcgttacgaactgcaaggttcggtgatcgccaccaccaccggttctgcgctggagctgatcaacttccgtcacccgttctatgaacgtctgtcgccggtgtacctggctgactacgtcgagctgggttcgggtactggcattgttcactgctcgcctgcctatggtgtggacgacttcgtgatctgcaagaagtacggcatggtcaacgatgacatcatcaacccggtgcagagcaacggcgtatacgtgccttcgctcgagttcttcggtggccagttcatcttcaaggccgatcaaccgatcatcgaaaagctgcgtgaagtcggtgcgttgatgcaaaccgccaccatccagcacagctacatgcattgctggcgtcacaagaccccgctgatctaccgcgctacggcgcagtggtttatcggcatggacaaagagccgaccagcggcgacaccctgcgtgtacgttcgctcaaagccatcgaggacaccacgttcgtcccggcctggggccaggcgcgcctgcactcgatgatcgccaaccgtccggactggtgcatctcccgccaacgtaactggggcgtgccgatcccgttcttcctgaacaaggaaagcggtgaactgcacccgcgcaccgtggagttgatggaagtcgtggctcagcgcgttgagcaagaaggcatcgaagcctggttcaagctggacgccgccgagctgctgggcgacgaagcgccgctgtacgacaagatcagcgacaccctcgacgtgtggttcgattcgggcaccactcactggcacgtgctgcgtggctcgcacccgatgggtcacgagaccggcccgcgcgccgacctgtacctggaaggttcggaccaacaccgtggctggttccactcgtcattgctgaccggttgcgccatcgacaaccacgcgccgtaccgcgagctgctgactcacggtttcaccgtcgacgagacgggccgcaagatgtccaagtcgctgaagaacgtgatcgaaccgaaaaagatcaacgacaccttgggcgccgacatcatgcgtctgtgggtggcctccaccgattactcgggtgaaatcgccgtgtcggaccagatcctggcccgcagcgccgacgcctaccgtcgtatccgcaataccgcacgcttcctgctgtcgaacctgaccggtttcaacccggccaccgacctgctgccggccgaggacatgctcgccctggaccgttgggccgtggaccgtaccctgttgctgcagcgtgagctgcaagagcactacggcgaataccgcttctggaacgtctactccaagatccacaacttctgcgtgcaggagctgggcggtttctacctcgacatcatcaaggaccgccagtacaccaccggcgccaacagcaaggcgcgccgttcggcgcagaccgcgctgtaccacatcagcgaagcgctggtgcgctggatcgcaccgatcctggcgttcaccgccgacgagctgtgggaatacctgccgggcgagcgtaacgagtccgtcatgctcaacacctggtacgaaggcttgaccgaactgccggccgacttcgaactgggccgcgagtactgggcaggcgtcatggccgtcaaggttgcggtgaacaaggagctggaagtccaacgtgcggccaaggccgtgggtggcaacctgcaagccgaagtcaccctgtttgccgaggatggcctgaccgccgacctggccaagctgagcaacgaactgcgcttcgtgctgatcacctccaccgcgagcctggcacctttcgcccaggccccggcagatgccgtggtcaccgaggtgccgggcctgaagctcaaagtggtgaagtcggccttccctaaatgcgcccgttgctggcactgccgtgaagatgtgggtgtgaaccctgagcaccctgaaatctgtggtcgttgtgtcgacaacatcagcggtgaaggcgaggttcgccactatgcctaatgcagccagtcgtttcggacgtctgggctggctcgtactgagcctgctggtactggtcatcgaccaggtcagcaaggctcacttcgagggctccctggaaatgttccagcaaatcgtggtgatcccggattacttcagttggaccctggcctacaacaccggcgccgccttcagcttcctggctgacggcggtggctggcagcgctggctgttcgcggtgatcgccgtggtggtcagcgccgtgctggtggtgtggctaaagcgcctgggccgcgacgacacctggctggccatcgcgctggccctggtgttgggcggcgcgctgggtaatctgtatgaccgcatcgccctgggccatgtgatcgacttcatcctggtgcattggcagaaccgccactacttcccggcgttcaactttgccgacagcgccattaccgttggtgcaatcatgctggcgctggatatgttcaagagcaagaaaaccggagaaaccgtcaatgactgatcaggtattggctgagcaacgcatcggccagaacacggaagtcactttgcattttgcattgcgcctggaaaatggcgacacggtcgacagcaccttcgacaaagccccggcgaccttcaaggttggcgacggtaacctgctgcctggttttgaagcggcattgttcgggttcaaggcgggcgacaagcgcaacctgcagatcctgccggaaaacgccttcggccagcccaacccgcaaaacgtgcagatcatcccgcgttcgcagtttgaaggcatggacctgtcggaaggcttgctggtgatcttcaatgatgcggcgaataccgaattgcccggagtggttaaagcgttcgatgatgcgcaagtgaccatcgacttcaaccatccgttggccggtaaaaccttgacgtttgatgttgaaatcatcgacgttaaagcgctctaactgacgaaaccggttcctgtggggctggcttgtgtgggagctggcttgcctgcgatagcatcacctcggtgtacctgatacatcgagtcgtttgcatcgcgggcaagcccgctcccacagaggcttattctatagagctgagttgatccaatttcttggcctgcaaggcacgaggcacagcatgcaaatcaaactcgccaacccccgtggcttctgcgctggcgtggaccgggcgatcgaaatcgtcaaccgcgctttggaagtcttcgggccgccgatttatgtgcgccacgaagtcgtccataacaagttcgtggtcgaagacctgcgcgcacgcggtgcgatctttgtcgaagagctcgaccaggtacccgacgacgttatcgtcatcttcagtgcccatggcgtgtcccaggccgtgcgtaccgaagcggccggccgtggccttaaagtgttcgatgccacctgcccgctggtgaccaaggtgcacatcgaggtagcgcgttatagccgcgacggccgcgaatgcatcctgatcggccatgccggtcacccggaagtcgaaggcaccatgggccagtacgatgccagcaacggcggcgccatctacctggtggaagacgaaaaagacgttgccaacctgcaggtgcacaaccctgatcgcctggctttcgtcacccagaccaccttgtccatggacgataccagccgcgtcatcgacgccctgcgcacgcggtttcctgctattggcggcccccgcaaggatgacatctgctacgccacgcaaaaccgccaggatgcggtcaagcaactggcggacgaatgcgatgtagtgctggtggtcggcagccctaacagttccaactccaaccgcctgcgcgagctggccgagcgcatggccacaccggcgtacctgatcgacggcgccgaagacatgcagcgcagctggttcgacggtgtcgagcgtatcggcatcacggcgggcgcctccgctccggaagtactggtgcgcggcgtgatccaacagttgcaagcctggggtgccaccggcgccgatgagctggcgggtcgtgaagagaacatcacgttctcgatgcccaaggaactgcgggtccgctcgctgctctgacggccagggtgctggaatagcctcggcataatgcctgctcggtcttgtcactgcgcaggctgacgcgcccgctgggggccagtacgatctgatacaggctctgtgcctggtccttgtcacacacatgcacggtgccggcacgaaatcccccgccggcgaacaccggctctcccaagccgctgaagcgcacctggcttgtcaccgggccattaccggcgaccggcacgcgcccattgctttcacgctccagcaatattggattgtcgtcatccaggtggccgcgcccacttacatccagtatcacgcgccatcccaggctccagtcctcgtcctttgcatgaatgaccaccgcccggttgcgcgcgatggcctcggtgcgtgcgtagcgcaacccggaggcgagtgcttgggccgcgttttgtcgttgctgcgattcaagcaaacccttgaaaccgggtacggccagttgcgctagaaaactggtgacgatcagcccgagcaacatttcaatcagggtgaatccttgttgtttcatgtgcgttccctccttgggcacgagtgggttgtctaggtatagcgcttggtccttggcgctggatgatggcctttatgtccaaagtatttccctttgttccgggagcagcgcggctctaaaaccgacgctaggcttgggtcgcacagcaggctttgcctgcttttttcaccggccttcgacgcggatgacgacgcaaatgccagcctgccacaaccgatttttcctgcgcgttgcgcacttgcgccagtccggcatgacgctggtcgaagtgctggtagcgctgttgatattggcgatcggcctgatgggcgctgcggtactgcaactcaacgcgctcaagtacaccaacagcgccaggatgaccagccaagcgagctttattgcctacgacatgctcgaccgcattcgcaccaatgctggcgccgattacacatggggcagggcggagctggcgccacccaacaccgccaccgctagcgtgcgtgacctggacctgcacgatttcgaagccaatatcatgggttttgccggggaggatgcgaaaggttcagtggtggtgaatgggcacgaggtcaccatcagcatcagttgggcagatgcccgggcagcaaaccgcccaggggcgcgggaaaccttcaccctgaccagtcgtatcagcaatgaacaaggagtgtcgcaatgaagcgtgttgtgcgaggtttcagcctggtggaagtgctgctggcgctcgccgtcgggttggttttgatacttggagcgagccagatactggtcagtgcgcggttgacccatgccagccagcaggccgccatggtgctgcaggatgatgcccggtttgtgctgagcaagatcacccaggatattcgccaggcaggcatgctggggtgtttggccgtggccgctatcgataatgctccggctgcctttgatcggccgataagctgggaagcggcggggagtacgaagtcactgacgctggtgaccgcgaatatcggcgatggtgtcggtaagcctgactggacagtactctccgactgcaaggaggcggcccgggcttatgccggcacaccacccgttgccgagcccggccagcttcgctttggcatacgtcaactgacctacacctacgagtcgggccagttgaagatcagtaccccggcagcacccgccagggcggtattgatggataacgtgcgggcattcgacgtcagcttcggcatggcgaccacctcggcatcaacggtcgtggtgcgctatgacagccatccggccgatgagtcgctgatacgtagcgtgcgcatcttcatgacacttcaagaccccgccggccgggtgaaggaccagacctacagtgtcgtggcggcactgcggaatcggctggggtaggggcaatgactatgcatggaggcattcgtgtacggcaggccgggatggtgctgctgatcagtctggtgttcctgttggtgctgtcccaggtggggctgtcttcgatacaggctgcggtctcccagcaaaaagtcgcgagcagcctgtggcatggcaatcaatcgtttcaaactgccgaaagcggcctgaggttgggggagtcggccgttcagaggagtggcctggggatgcctgtatgccactcgatcatccgctgtgcgccgcctgctgaagctttttccctgactgcggccgggacgaatcctgcttcggcggtcacctggcttgccttgaagaatgggttttatggcattcaatccctcggagagggtgaagggctggcttatttgccgccccgttcccaggcctcgcttttccgagtcacctcggtcgggctcgcggggcaaacgcgcacggtgctggagacggtctatgcacgggtggaggagggcggccgcgtcaagtttcgacgggtcttatggcggcaacttcaataaggagcaatcggatgggcaaggagagccagggttttaccctgattgagttactgatcgtcgtggcgatcatcgcgttgctggccgggattgcgtatcccgggtatctcggccaggtgaagaaggtgtatcgggcgcagatcgtcgcgttgttgagcgaacaggcccagcacctggagcgttcttatacgaggaatggcacttttattgatgcaggcgacgtcagcgcgggcaatgatcattatagaatcagtgccgtcctcaaccctcaggattttgacctgctcgccactcccgctgcggactcggtcatggcgaacgacgcatgcgcagccttcagcttgaccagcaccggtatgcgcggcaacccgggagcagggcctgaaatgtcgcccaaggtctgctgggggcaaggatgagcgtacttgaagcgtgggcgccgggcgcgcctttccctgtttatcggctggatcaaatgatggctaagcaacagcaagtggtgattgtcggcggcggagtaatcgggctgttgacggcgtacaacctcgccagtgagggccaggcggtcacactgctggagcgcggtgggcttgggcaggagtcttcctgggcgggcggcgggattgtctcgccgttgtacccgtggcgttatagccaggcggtcacggccttggcccattggtcccaggatttttacccagaactggcgcaacggctgtttgctgcgaccggcgtcgatccagaggtacataccacggggttgtattggctcgacctggatgacgaagcgcaagcactggcctgggctgcgcgtgaagggcgaccgttgagcaaggtggacgtatcggcggcccatgacgcggtaccggtgctggggggcggctattcccaggcgatctacatggccgatgtggccaacgtacgcaacccgcgcctggtcaaatcactgaaggcggccctgctggcgttgccgaacgtgacgatttgcgagcaatgcgatgtgtcgggttttgtgctcggcgacggcagggtggtgggtgtgaataccgctacgggccaggttttgggggatcaggtggtgctcgcggccggcgcctggagcggacaattgttgggtacgctgggcttggggctacccgtggagccggtcaaaggccaaatgatcctgtacaaatgcgcgtccgactttttatccagcatggtcctggccaaggggcgttatgcgatcccgcggcgcgatgggcacatcctgatcggcagcacgttggagcatgaaggattcgacaagacgccaaccgacaccgcgttggaaagcctcaaggcgtctgcggtggaattgattcccgccttggcggatgccgaggtagtcgggcattgggccggtttgcggcctggctcacccgaaggtataccgtttatcggtgaggtccctggcttcaaggggttgtggctcaattgcgggcattaccgcaatggtctggtactcgcaccagcctcttgccagttgttcaccgacttgctgctgacgcgggctccgatcatcgatccagcgccttacgcccccgcagggcgcctcaacgctggatagactttggcccttgttccaggtgtgcctgggtgcagtaccattgctggcgtgagctcagtgcgcggtcctgcggcaggtgcacgccacagtgggcgcaacgcaccatcagggccgcatccggctcagcaggccgctgctgacgggcggcagggtttttgaatttgcgccagaaccataccgcggcagcaatgacagcaatccagaacagtagacgaagcatgatgggcagtttctcgacaaggaatgcgccagtttagccaaggtgatcccgggcgcacagggcaataaatactcgctcataaaaaagggagctccttaagagctcccttttgcgttgcgtcgaacaatcagtcgaacacaccgaaggtcatgtagctgaaccacgagcggtcctggttgttgcccagtgcttgcggctcttcttcttcgatcacgtcaccgttctcgtcgtgcggcttgagatccgaaggaatagcgtccttggcgtcctggtacatcttgatcacgtcctggttggcgcgagtttcacccggcggcagtggtggacgggactcgatcaagcccagggtgtacttgctcagccacgaacggttgtccgcttcggcaacctgaggcacgaactggccgtctttcaggctcgggtggtcaggatagttgagcttcagggtttccaggctggtagtcgccagggtgtccaggtgcagacgctggtaagcctcggtcatcacggccaggccgtcacccacggatggggtttcctggaagttttccaccacgtagcggccacggttggcggcggccacatatgcctgacgggtcaggtagtagtgggccacgtggatctcgtacgaagccagcaggttgcgcaggtagatcatgcgctgcttggcgtccggcgcgtagcggctgttggggtagcggctggtcagctgggcgaactcgttataggagtcgcgggcagcacccgggtcacgcttggtcatgtccagcggcaggaagcgcgccagcaggccaacatcctgatcgaacgaggtcaggcccttcatatagtaggcgtagtccacgttcgggtgctgcgggtgcaggcggatgaaacgctcggcagcggacttggcagcttccggctcggcgttcttgtagttggcgtagatcagctcaagctgggcctggtcggcatagcggccgaacgggtaacgcgactccaatgccttcagcttcgctgtggcgctggtgaagctattattgtccaagtctgtctgagcttgctggtacagctcgacttcgctcaggttttcgtcgacgacgtcctttgttgacgagcaagcagcagtcatggcgaggatggcgatcagcagcaggtgtttcacttgcatggcggcttgcgtccctatgacggccgctgtcttgggcggggccgtcctgttatgatgagcgccccgttgaaagcctcggggcaaaagacgccgtatttaaccacaagcgcgcagccgaaaccaaaggctacgccacgcctagtctgagcatgtccgataaaattgaacttcgcgcagaggtgccgtccgaattgggcggccaacgcctcgatcaagtcgccgcacaattattcgctgagcactcgcgctcgcgcctttccgcctggataaaagacggccgcctgactgtggatggagcggttatccgcccgcgagacatagtccatggcggtgcgattcttgagctgactgccgagcaggaagcccagggagaatgggtcgcccaggacatcgagctggatatcgtctatgaagacgacgacatcctggtcatcaacaaacccgcaggcctggtggttcacccggccgccgggcacgctgatggcaccttgctcaatgccctgttgcaccatgtgccggacatcatcaatgtgccgcgctgcggcatcgtgcaccgtctggacaaggacaccaccggccttatggtggtagccaagaccattcaggcgcagacgcaactggttacgcaattgcagagccgtagcgtcagccgcatctatgagtgcattgtgatcggcgttgttgtggccggtggcaagatcaacgcacccattggtcgtcacggccagcagcgccagcgtatggcggtgatggagggcggcaagcaagccgtcagccactaccgtgttctggagcgtttccgctcccacacccatgtgcgggtcaagctggaaaccgggcgtacccaccagattcgcgtgcacatggcgcacatcaacttcccgttggtcggcgacccggcctacggtggccgcttccgtattccgccggcggccagccagaccatggttgagtcgctcaagacgttcccgcgccaggcactgcatgcacgtttcctggaactggatcatccgacgagcggtaagcgcatgagctgggaatcgccactgccagacgatctggtctggctgttgtcgctgctcaagcaggatcgcgaggcgtttgtcggatgagtgactggctgatacctgactggcccgcgccggctcgggtaaaagcctgcgtcaccacccgcgcgggcggcgtcagtctggcgccgttcgacagcctcaacctgggcgatcatgtcgaggacagccttgaggccgtccttgaaaatcgccgtcgcctgagtgacgccttcgatatccagcctgcctggttgcgccaagtccacggtactcaggtggttgaggccgatccgggccgtactgtcgaggctgacggcagttggaccagtacccctggtatcgcctgcacgtccatgaccgccgattgcctgcctgcgctgttctgtaatcgggcgggcacccgggttgccgcagcccatgccggttggcgtggcttggcagctggggtgctggaggccgctttcgagagcctggatagcgcacccgaagacgttatggtctggctcggccctgccattggcccacaagcctttgaggtcggcccggaagtgcgtgaagtgttcatgcagcaactgccggccaccgctgaagcctttgttcccagccgcaaccctggcaagtacatggccgacatctaccagctggcgcgtctgcgtctggccgctcgcggtgttagcgctgtgtatggtggcggtttgtgcactgtgaccgacccgcgtttcttttcttatcgccgcagcccgcgcacgggccgattcgcctcccttatctggcttgaacgctagactgtcctgacctgtatcaaccgtccgccgcttgaaacgcccagaatccaccccatctataagggtatctggcaggtttcttcattcaggatgtgtttgttcatagctccggcctgctcaaaaggaaggtgactaatgcgtattgatcgtttaaccagcaaattacagttggcattgtccgactctcaatctttggcagtgggcctcgaccacccggccatcgaacctgcgcacttgatgcaggcactcctggaacagcaaggtggttctatcaagcccttgctgatgcaggtgggctttgacgttaacagcctgcgcaaggagttgagtaaagagctcgaccagctgccgaaaatccagaatcccaccggcgacgtaaacatgtcccaggacttggcgcgcctgctcaaccaggcagaccgtctggcccagcagaaaggtgaccagttcatctccagcgaactggtgctgctcgccgccatggacgacaacagcaagctcggcaaattgttgctgggccagggcgtgagcaagaaagccctggaaaacgccatcaacaacctgcgtggcggcgaggcggtgaacgaccctaaccatgaggagtcgcgccaggccctggacaaatacaccgtcgacctgaccaagcgtgccgaagagggtaagctggacccggtgatcggccgtgacgatgaaattcgtcgcaccattcaggtgttgcaacgtcgcaccaagaataacccggtgttgatcggtgaacctggcgtgggtaaaaccgcgattgccgagggcctggcccagcgcatcattaatggcgaggtaccagacggcctcaaaggcaagcgcctgctgtctctggacatgggctcgttgatcgccggtgccaagttccggggtgaattcgaagagcgcctcaaatccttgcttaacgaattgtcgaagcaggaagggcagatcattctgtttatcgacgaattgcacaccatggtcggcgccggtaagggcgaaggctccatggacgccggcaacatgctcaagcccgccttggcacggggtgagttgcattgcgtcggtgcgaccacgctcaacgaataccgtcagtacatcgaaaaggacgcagcgcttgagcgtcgcttccagaaagtcctggtggaagagccgagcgaagaagacaccatcgcgatcctgcgtggcctgaaagagcgctatgaggtccaccataaagtggcgatcaccgacggtgcgatcattgcggcggccaaattgagccatcgctatatcaccgatcgtcagttgccggacaaggcgatcgacctgatcgacgaagcggccagccgtatccgtatggagatcgactccaagccggaagtgctggatcgtctggatcggcgcctgattcaactgaaagtcgaatcccaggcgctgaagaaagaagaagacgaagcggccaagaaacgcctggaaaaactccaggaagaaattgtccgcctggaacgtgagtattcggacctcgaagaaatctggacctcggaaaaagccgaagtacagggttcggcgcagatccagcaaaaaatcgagcagtcccgccaggaactggaagccgcgcgccgcaaaggcgacctgaaccgcatggccgagttgcagtacggggtgatcccggacctggaacgcagcctgcagatggtcgaccagcacggcaaacctgaaaaccagttgctgcgcagcaaggtgaccgaggaagaaattgccgaagtggtctccaagtggaccggtattcccgtgtcgaagatgctcgaaggcgagcgcgacaagctgttgaagatggaaagcctgctgcatcagcgcgtcatcggccaggaagaggcggtggtggcggtgtccaacgccgtacggcgttcgcgggcgggtttgtccgacccgaaccgtccaagcggctcgttcatgttcctcggcccgaccggtgtaggtaagaccgagttgtgcaaggccctggccgagttcctctttgatacggaagaggccatggtgcggatcgatatgtccgaattcatggagaaacactcggtggctcgcctgatcggtgcaccaccaggctatgtgggttacgaagagggcggttatctgaccgaagccgtgcggcgtaagccttactcggtgatcctgctggatgaggtcgagaaggcgcacccggatgtgttcaacatcttgctgcaggtgctggaggatggtcgcttgacggacagccacgggcgtacggtggacttccgtaatacggtgatcgtgatgacctccaacctgggctcggcgcagatccaggaattggtgggtgatcgtgaagcccagcgtgcggcggtgatggacgcgttgaccacgcacttccgtccggaattcatcaaccgggtcgatgaagtggtgatcttcgagcctctggcgcgggatcagatcgcgggcatcaccgagatccagttgggccgcctgcgtagccgcctggctgagcgcgagctggacctggagctgagcggcgaagcgttggacaagctgatcgcggtcggttacgacccagtgtatggcgcacggccacttaaacgtgcgatccagcgctggatcgagaacccactggcgcagttgatcctgtcgggcagctttatgcctggcactcgcgtcacggcgacggtgaaagacgacgaaatcgtcttccattaagccctgcgcttggcgtaaacagagaaggccccgcatcgcggggccttttttttcgatagggcgttgaactgtaaggcaaaggcttgtaaagtgcgccccgcagcaacgtcagcccacgggtttcttctccccaagaagaaatcagaaagaagcgcaaatcattgtcttaaaagcaatttaaagggttgacaggggtttttaagattgtagaatagcgcgcctcagagacgctaacgtagcgatacggacagggtcgaagaggaagcaacacagcagtaactttgaaatatgtagttccgtgatagctcagtcggtagagcaaatgactgttaatcattgggtcccaggttcgagtcctggtcacggagccaatttcaaaccggggtatagcgcagtccggtagcgcgcctgctttgggagcaggatgtcgggagttcgaatccccctaccccgaccatattnnnnnnnnnnnnnnnnnnnnnnnnnnnnnnnnnnnnnnnngggtcgttagctcagttggtagagcagttggcttttaaccaattggtcgtaggttcgaatcccacacgacccaccatttttgagaccagttaacgctggaatcgaatcttaagatcagaggccaaaagcgctgatcgaagaaggcgactgaaaggtcgcctttttattaccggggtatagcgcagtccggtagcgcgcctgctttgggagcaggatgtcgggagttcgaatccccctaccccgaccatattaaaaatcctcgtatcgaaagatacggggattttttttgcctgcgtgaatcctgaattcaccgcaaaacaaatgtgggagcggcggtgcaacgattcgacttgctcgctcccacatttaccaggcctctttcgagaccaggttgttaatgcaatttaaggcgtggctcggtgccgcggccgatcttgctgcccagcatcagcatcgccgtgcggaagaacccatacagcgccatctggtgcatgcggtacagcgacacgtagaacatccgcgcgagccagccttccagcatcacactgcccgtcaaattgcccatcaggttacccaccgcggaaaagcgcgacagtgagatcagcgagccgtagtcggtgtacttgtaggtcggcagctccttgccttcaatccgcagcttgagcgatttggccagcaatgacgcctgttggtgagccgcttgggcccgtggcggtacattgcggtcggtgcccggctgcgggcaggcggcgcaatcaccaaaggcgaagatgttttcgtcgcgggtggtttgcagggtttgcaggacttgcaactggttgatgcggttggtttccaggccatcgatgtccttgaggaaaccgggggcgcggataccggccgcccagaccttgaggctggccgggatcacttggccgctgctggtgatcagggcgtcggcggttacttcactgaccgccgagttggtcagtactgtcacccctagtttctccagggtcttatgcactggccccccgatccgctccggcagggcaggcagtacacgcgggccggcttcgatcagggtgatgtgcatgttttctggcttgatacggtccaggccataagccgccagttcatgggcggcgttatgcagctcggcggccagctcaacgccggtggcaccggcgccgacgatggcgacgctgatctgttcaacggcgtcggtttggcctgcatgggcgcgcaggtagtggttgagcagttgctggtggaagcgctcggcctgcttgcgggtgtcgaggaacaggcaatgttgcgctgcgccttcagtgccgaagtcgttggtagtgctgcctaccgcaatcaccaggctgtcgtagcccagcacacgagcaggcaccagttcgcggccttcttcgtcgagggtggcggccagctggattttcttctgttcacggtcaagcccgctcatacggcccagctggaactcgaagtggttccatttggcttgggcgacgtagttgagttcgtcttccgaggaattcagcgagccggcagccacttcgtgcagcaagggcttccagatgtgggtcaggttggtgtcgaccagcgtgatgctggccttgccacgcttgcccagggtcttacccaggcgggtagccaactccaggccgccggcaccgccgccgacgataataatacgatgggtcatggggatatctcgcaaggctaaaagaaatcggagcagttaccctcgcgagcgccaggcggctcatagcgtcaggtaactcaataggcggctcagcgtaccgagcccgatcaccactaccagcaccacgcagaggagcagccacggccggaaaggcttgcgctcgactctgttctgggagagttgcaggtactcttcgacacgctcttggtcatcgggtttcaggcggctggtcataaaggcctcgtcaggtagacgttgcaaaggggcgccacgttacagccaggggcatcacaggctgatgccgacatcaaacactatgctgcggcccaggttgttgcgcaagaagtccggcgcgtcgggatgtgcgaacaggacccgtgcgaatgtcggccccaccagcgatagcgagcgccagccctgacgcaggtattcggtcggcggcggaaaatggctgttgaggtccagcacctcgcgtttgaggctggtaaacgcaatgaggtccagctcccccaggtccatgccgcgctctttgtagttgtgagcttttttacgcagtgtgggggccaggcgcagcaggaactcatgggcggggatacgccgtggcttggcttcacgccgtaccagttggctcaaggagaaagcactgcgcctgcgcagcaactcatcgcgccactcgtcgttcaggcggcggccctcgtccagcacaaaaaagacctcgaagctggcgtcgcgaaacagcacgtcgggcggctcctggcccgcagcgtgaaactcttcgacgcggtagggcacgttcaagccttgcagcaggcgctggcagacccaacgctcacgctcccacttgcgggcattggacaggaatgcgttggcttgttcggccgctacggtgagcaggcgcaagtaatctgagtcatccatagtcgcagcttagcgtccaaatgatgaccacaggaagtcttgccttaaaacgcgggtgtagaatgctcacgtgaaacaggccagggacgaggtgtgtgatgagttttttagtaaaggcagagcgtccgtgatcagtgctgcggttctggcaccccagaccctcggtatcggctggctggtgtatgcgcccgtggtgatgtgggcgatccttcgctcgccctgggtggagctgtttgccgaccgtcggcgccagcacttgctcttcggtacggtgttcgcgctgttcatgctgtggctggtgcggcgggatttcgataccggtgtgtcctaccactttatcggcatgaccgccgtgactttgctgctcgattggccgctggctatcgtcggtggctttgccgcccagcttggcttgatgctgttggggcgtcaggacctggctgcgcttggcgtcaatggcctgctcctgattgtgctgccggtgctggtcaccgaagggtgcgcgctgttggtggagcgggcgcagccgcgaaacccctttgtgtatatcttctgttcgggcttttttgctgccgcactgtcggcattgctgtgcctgttggccggcctgggcctgttgtggttcgacggcctttttgcgatgcctgagtggttggaagattttgtcggttacctgtggctgatcatctttcccgaagcctttatcaacggcatggtcatcagcgcgctggtggtgttttgcccggaatggctggagacgttcaaccgtacccgctacctctcagcgccgtggaaagacgacgattcgcggcgttgatccaggtcaaatgcagggaagcggcgcaggtccatgctcggcaaaattttcaggagcatgaatcatgagtgtgtatgaatgggcacggcaggagttgcgcagaagccaggatgcagcgcaggaaatcgggtttgaccccggtttgaccttgcgcgccatgctcagcgcagtggtgcagcaaagcaagggtgtacgcagctttgaagacctggccgacgagttgcaataccttgcagaaaacctcgacgaccagcaggaatatgcctttatgcggccttagtggcgcggcggcaggtcttcggaaaacagttcatcttcggcgtcaggggccacgggaatcttgtgttcttcagcggcccaggcgcccaggtcgataagcttgcaacggtccgagcagaacggtcggttgagattggtcgctttccattccacgggtgcaccgcaggttgggcagtcgacggtcaggggttggctcatgatcggcctccacgcaaagtaaggtaaaagtggtgcagtcgctcgacctcgccgtgcagccaggcgaggtccttatcgttgaccagcacgtcatcggcatggttcaggcggtcttcgcggctggactgggccttgagaatcgcctgcacctgttgttcgctgatgccgtcgcgctgcagggtacgctgaatctgcagcgattgcggcacgtcgatcaccaggatgcgctgggtcatgctgtactgcccggactcgatcagcagcggtgacaccaggatcgcgtagggcgactgggcgcgtgccaggtggctgcgaatttcctcggcgatcagcgggtgcagcaaggcttccagccaaaggcgctcttgtgggacctcaaagatcagtttgcgcagtgcggcacggtccagtcggccgtcggcttgcagcacgctggcgccgaaatgttcggcaatgcgcgccagcgccgggcggccaggctcgaccacccagcgcgcggcgtgatcggcgtccaccaggtcgatgcccagcttgataaagtgctcggccgcagcgcttttgccgctgccaatgccgcccgtgagcccaagaatccagggtgttgcaacagaagtggtcatctgaaaccgacagactgcaaatagaagtcggttatttgaccaccccagagcaatgcaatccagccggcaattgccaggcaggggccaaacggcattggcgctgacacctgggccttacgcaaacgcagcaaaatcagcccggcaaacacgcccagcagcgaggccatcagcagggtcatcggcagaatctgccagccgccccaggctcccagcaaggccaataatttgaagtcgccatggcccatgccgtctttgccggtggccagcttgaacagccagaacaggcaccacaagctcatgtagccgatgaccgcgccccatactgcatcgggcagtggcgtcagcaggtcagcgctgttgaggatcagccccagccatagcagcggcagcaccagcacatccggcagcaattggtggtccagatcaatcaggctcatccccagcaagccccagctcagcagcatcaccgcgccggcttgccagccaaagccgaagtgccaggcgacagcggcgcagatcagcgcgcaggccagttcggtgagagggtaacgcaggccgatgggctcacggcagtgggcacaatgcccccggagcagcaggtagctgagcaccgggatattttcccaaggccgaatcggatgattgcagcgcgggcagcaagagttcggatgcatcaggttataggccggcccaccgggctcggctggcaagtcgagaatctcatgggcctgggcacgccactcccgctcgagcattttgggcaggcgccacgccaacacattgagaaagctgccgacgatcaggcccaacaccagcgccacgccgacaaacgcccagggatactcactcagcagcaggctcaaaacgccgtccccaattggaacaccggcaagtacatggcgactaccagcgcgccgacaatcccccccaataccaccatgatcagcggctccatcaggctggtgaggttgtcgaccaaggtatccacctctgactcgtagtggttcgcgactttttccagcatgcggtccagggtgccggactcctcaccgattgcggtcatctggatcgccatgcctggaaacaggccgctgttatgcatcgattgattcaactgcatgcctgtggatacatcgtggcgcatacgttcgattgcctgtttgaaagggccattgccgacggcgccagccaccgaacccaatgcctgtaccagaggaacgctcgccgcaaaggtagtggatagcgtgcgggcgtagcgagcaacggcagatttgtgcagcagtttgcctgccacgggcactttcaacaaacctgctgcccacccatggcgaaaccctgggtgagtccggtaggcgtggcgccctgcaaccagcgccgcgcccacacccagccccagcatccaccacgcctgttgcagcagttccgatagcgcgatgacccccagggtaaaccccggcaattggccgttgaccccggcgaacaagttctggaattgcggcaccacatggatcaacagcactgtgctcacccctgtggcaattaccagtaccgcgatagggtaggtcatggctttcttgatcctggttttgagccgttggcttttttccagatgaatcgccacgcgctccagtagggtttccagggcgccggccatttcgccagccgctaccagattgcagtacagctcatcgaagtagcggggatattgacgcaggacagcggccaacgggtggccgctggcaatatgctgtttcaacgccttcaccagttcgcgcagctgttggttttcgacgccttcgctgatgatgtcgaaggcttgcagcagcggaatgccggccttgagcaaggtggccaactggcgagtgaacagggcgatatccacgggcgttatgcgcgtcttgaaggtcggcagtgcacaagacttcttgcgcacacgctcggggcagatcccttgctggcgcagttgtaccttgatcagcgcaaggttatggccggcgattgttccggatacccggcgccctttgcggttgatgccctcccaggcatagattgtcgacgtatcgttcatgtgaggttggtgcacccaggtcgtgaagaatttatagcttagtcaggtggcggagtcgggcaggctggtgctgggcgataaaatgtcagattgtgcgtcttgcaggcgaacggctgcgaggggatgagtacactggcgccgttgcacactacggggcgcaggacgcgccttgtcatggttctattctggagagtgaaagagatgcgtcaaaaaggttttaccttgatcgagttactgatcgtcgtggcaatcatcggcattttggccaccatcggtctgcccatgtacaccaagcaccaggccaaggccaagttcactgcggggttggcggaaatcagcgcgttaaaggccggctatgaagacgtcatcaaccagggcactgtgccgaccctggcgctcatcgggggctccagccctaccgccaactgcaccatcgatgtgacaggcgatgtggcctcgggcgcaggtactatccgttgtgaaatcctcgatgcgcccgcgcccgtgctcggcaagaccatcaccttgacccgcagcgccaccaccggctggagctgtgccaccacggtagagccgcaatacgttgccaagggctgcggcgccaacggcgcgtgacagccgccgggcggtgagcgagtcagttgctgcatgcccaatgcagtgctagctttagcccaccgcccgtgtagctcagccggtagagcagcgcactcgtaacgcgaaggtcgcaggttcgattcctgtctcgggcaccacaggcaccactgtttcaacggcaatgttttcagatgatcccagaatggttctgaaggccaggtgagccgggcatttgcgcccgctcttttgtatctgcgcaaccttgaagacccagatgcattcccattcctcgatctaagagaacaacatgaccacgactgaaatgacccaggacgctcggcacgaacaagcgctcaagcactaccttgaggacacgccgcagctaaaagaagagatcaaggacctgagtgccgacgatcagcgcgaccagattcagtgggcattcgaggacgaggccgagagccagaacctccagccttgggagctgaccctcaagtacaccacgacccctgaggagttcgaagctgcacggttggccttgcacaaagaggcggccgaggtgctgggtgtcgattgggacgagtactgcgagatgaataacctcgtagtttaaaagcagcctgtaggagcgagcttgctcgcgaaaaacgctagcgataacccgtacctctggagggcacgcggtggtcttgagtttttcgcgagcaagctcgctcctacaattacggcatctttcagatactgaggcgcatcgacaggtccaccgccttcacatccttggtcatcgcgccgatggagatgtagtccacgccggtttcagcgataggcagcaaggtggtttcattgatcccgccgctggcttccagcttggctttgccggcgttcaggcgcacggcttcgcgcatgtcttccaggctcagttcatccagcatgatgatgtcggcacccgccgccagggcttcgcgcaactcttccaggctttccacttcgatttccaccggcttgcccggggcgatcttgtgggcggccgtaatcgcttgggcaataccaccgcaggcggcgatgtggttttccttgatcaggaacgcgtcatacagcccgatacggtggttgtggcaaccgccgcaggtcaccgcgtacttctgcgccaaacgcagacctgggagtgtcttgcgggtgtccagcagtttgacctgggtgctcgcgacaaagtccgccaggaactgcgctcgggtggctacacctgacagcatctgcaaaaaattcagcgcactgcgttcacccgtgagcagcgagcgtgccgggccttcaaggtggaacagcgcctggttggggctgacacgttcaccgtcagctacctgccaatgcacggcgacccgtgggtccagttgacgaaacactgcatccacccaggccgtaccggcaatcacggccgcttcacgggtaatgatcgtggccttggccagccgttcggccgggatcaactgcgcggtgatgtcaccactgccgatgtcttccagcagtgcgcggcgcacgttggcttcgatttcggcggtgaggtcggcaagacggaggttcggcataacaggctccacaaacaaagtgcctcgattatagggccagcgtgcgttctaacccaggctcgccactcatttaccgcacaaagtcagagtgtgctggcgcaactgcccttgtttgcaagataatctcgcgccttgcaattggcgtcatagctttgacgtcttggtggtagccgggatatttgcagtgcctgccgggcctgctcccggtctgtccacctctcaaaaccgccgtttcaggaggccaggatgcacaatgacgggaaggtggtgcctatcaacagggcacaggccacgccatcgccgctcgcgcgcctgccggtggtgttgctgcaggtgcgtgacaaggctgcgcaacagctgcaacagggtttgcaggaactgttcgataacgccgacgacaccctgtttgaaatggccgaaaaggcccgtagcaccgtcgaccatcatatttttttcgaggccatgcgcgacctgcgcctcaagcgcaagaacttcgaacgcgtgttcatggagcagttgttcgtggcgttcgccaacctgggccaggcccggtgcagcggggcacacctggtgccgctggtgtcttatgaggcggtacccggcaccagcgccgatgacgtggaaaaagctgtggccctggaggcgatgctcggtcgggtgcgccaccgtgatggcttggcgctggggcaattgaacgcgcgcttgagtgaactgttcggcaggcgcctggatgatccggaaaaccccttggccccgacgcggctgtgcgagtttttcttgcaggcagggcgcagcctgggggtggagatccgcgtcaagctggtcatgctcaagctgtttgagaagtacgtgctcagtgacgccgacctgttgtatggcgaggccaaccaattactcatcgccactggcgtattgccggagctcaaggcgctcccgtcccgccgagccggcgggcgtgcggcccgggagcatcaggattgcactggccaagcgatggccgacccgccgctggataaaagcggccagcaagcgttcagcgccttgcagacgttgctggtagccgtgcgtggcagcgtggcccccacccttgaagccagcgccgagccgcaacccattgccacccgcgatctgctgcggctgctgtcgcatttgcagcaatatgtaccggagccggagtgcgaggacgatttcgacctgcgcagccagcttgaacagttgctcacccgggtcagtgtcaaaagtggcaagtcgcgggtgttggaagaagcagacgaagatgtgatcaatctggtggccatgctgttcgagttcatgctcgatgaccgcagtgtgccggacgctttcaaggggctgatcgcccgcttgcagatcccgctgctgaaagtggcggtgctggacaagagcctgctcagttgcacgcagcatccggcgcggcgcttgctcaatgacatcgcgagcgccgtcatcggctggagcccgccccatgaccagccacgggacaatctctatctgtgtatcgagcaactcgtacagcggttgctgaatgagtacgtcgaagacccggcgattttctcccagttgctcaccacgttcagcacatctacagcccaagagcgcacgcgcagtgaacgccttgagcgccatacccgggacgccgagcaagagcgcctgcatatcgaggtggcgcgccaacgtgtggcgcaggtgctcagtcggcggctcgtgggcaaaaccctgccggcatcggttctgcaatttgtgcagcaagcctggagccaggtgctgttagtggccgtgctcaagcacggtgaacaatcgctgcaatggcagacggcgctgcgtaccctggatgaattggtctggagcgtgggcctgcgtgaagacaccgaagcaggtcggcgtttgcttgagcaactacccgggctgctcaaggcattgcgtgacgggttggccggtgcggcgttcgatcctttcagcacccgcgagtttttcctgcggttgcaggccatgcatgttcagccgctcgacggcgaggtgctggttgaagtgcgtaagccttttatccttggctctgggccgccgactgccgacgaaccactgccccctgacgaccccgaccggctcaaggcacagcagttgcgagtcggtgcctgggtagcgttgcagcaacatgaagccggtaccctgcgttgcaagttgaccgcaatcatgccgcccgacgatacctatatttttgtcagtcgagggggcctcaaggtcctggagaaaagcgcggggcagttagccctggcgttcaagcagggcgtcctgcacgccttggatgatggcccgctgttcgagcgtgcgctggcagccgtggtgggcaacctgcggcaactcaatcgcggcaagtgatcgcaaccgcagggtggaacgcggcatactggtcacacctcgtctcactcaaggagcctgtatgcagttggaccccgccagcggttggtgccagggcattcgtcattgcccttcgcccaacttcaacgagcgccctgaaggcgaaatctcgctgttggtggtgcataacatcagtttgcctccggcgcagttcaagaccggcaaggtgcaggagtttttccagaaccgcctggatatctcagagcatccctactttgaagggatagccagcctacgagtgtctgcgcattttctgattgaacgtgacggcactgtgacgcaatttgtttcgtgccgcgaccgggcctggcatgccggtgtttccgtttttgacgggcgcgaggtgtgcaacgatttttccctgggggtcgagctcgaaggtacggacgacctgccgttcaccgatgcccagtatgcggcgctgatcgatctgacccgccagttgctcaaggcttacccaaagatcacccaccaacgtatttgtggtcacagcgacatcgctccggggcgcaagactgacccgggccccgcttttgattggacgcgctttcgcagcgccctgcaggatggaggacacgaacgatgagtttcctggtgttggtgctggcggtatggatcgagaagttctcggccttgcgcctgcggttgcagcgtgacggcggatggctgcgtgagctggccaagctggaatcgagcccgcgcatgggcaagcggccctggctgatcctgctggtgttggtgctgttgccggtggcattgctggccttgctgttgctggtcctggagccggtggcctatggcctgttggcattgccggtgcatttgctggtggtgatctatagcctgggccgtggcgacctattggcagggctggggccgtttcgcgatgcctggcggcgcggtgacctgcaagcggccgagcatgtggccgaacgcgacctcaagcttggcgccgacagtggcgagcaactgctggagcgcgtccagggctacctgctgtggcaggcgtaccaaagcttttttgcggtgattttctggtatttcctgctgggcccggtggccgccctggcgtaccgcctgttggcgctggccagcgaacacagccagaaccccctggtggccgagcgcgccacgcaattgcgtcacgcgtttgactggttgccggtacgcctgctggcggccagctttgccttggtgggcaatttcgtcggggtcagccgggtgatgctccacgaattgctgagttgggacatcagcgcggcacagctggtggaaaaagtcggcctggccgctgcggaaatcccgccgccagtggtgggggccgatggcatcaacagcctggatcgcctgtgggaactgctgctgcgcgcggcggtgctgtggtatgccgggtttgccatctggacggtactcccctgatgccaatttgtaggagcgagcaagctcgctcctacatggcgttagggcctccagacacgccgttaaccttacgttacaaaactccctttcgaattgagctatacagatagagcgccaaatagtggctatctgccgccgccctgcgcctcaataaaaataaaagaaggggaggtcacctgtgaagagcttgctctatcccgccgtcgcgctgatgaaccgcctgagcttcggcatgaagttcagcctgatcagtgtgctgtttctgctgccgatgctggcgaccaactattacctggtgcgcgactcgtggcgtgaataccagggcacccgggtcgaactgcaaagcctcgacctgctcggcagcagcctggcgttgcgtcgcgagctggaaaccctcaacaaccaggtacagatcaacgccaccctcggccagtctggcaaagcggcagacctggagacccggatcagcgccttgcaaaccagtgtagtggagcgcttgcagggcttgcgcgccattgcgacccagcccgagcaagttgccgtcttcgacagtaaacgcgacgaactgatcgctgcgttcaaggcccagcagcaggaaacctcgctgctcaacaaggcggcgttgatcggcaagttactcaaccaggcccagatgttcagccagatcatcgccagccaagccggcttgagccgtgatccgcaaagtgatctgcgccagctcagcgacctggtcaccaccatcactcctcaagtcacccaggccttgggtgaaggccgtgccatgggcgcgtactccctggggcagggctttatcaattcgtcctccagcacccgttttgacgaactgctgcagcagttggaaaaacttcacggcgaatatggcctgaagctgcaggacgcgttgggcaccagccaggccgcgcacgccgccctcgacgtctcggcgcaagccagccaggcgagccttaagcaaggcagtgagtttttcgaagagcaggtggtgatggccgagaccctcgacgcgccttggcagggcttttatgacggcgtcagccaactgatggccaagacctatcaattggatgacgccaccctggcgttcctcgggcagcagttgcagcagcgcctggcgcagaaccgtttgcacatggtgttgctggtcacggccctggcggcggtgtttgcgctgattttctatctctatgccggtttctttgtctccacccgcaccaccttgcgccgcctgggggcgatgatggacaaagtggcggcgggcgatatgacggtcaccttcgttgcccagagccgtgacgaactgggcgacctgggccaggtgttcaatggcactgtggccaagattcacgacctgatcgagcgtgttgggcatacggtcagccaggtggagttgcaggccggccaggtgcaggcggtgtcggcgcagagtaaccaggcggtgtccggccagcgcagccagatcgagcaagtggcgacggcgatgaaccagatgtccgccaccgcccaggaggtggcgcgcagcgccgcggcggcggtcagcagtgcccaaagtgtcaacgatgaaaccgtcagcgggcgtgcgctggtgcaatcccagcaaggcggtattgcgcgcctggcggcggagatcgacgaatcggtgcgggtgatcaaccatctggcgaccgacagccagtccatcagcagcgtcctggaggtgatcaagagcatcgccgagcagaccaacctgctggcgctaaacgcggccatcgaagcggcgcgcgctggtgaccaagggcgcgggtttgcggtggtggccgacgaggtacgcactctggcccggcgtacacagcactccaccgaggaaatcgagcagatgatcatccgcttgcacagcggtgtcggtgcggcggtgaaggccatgggcagcagccatgaaatggcgaatggcacggtagggcagtcggaaaaagtccaacaagccctggaaaatatcctgggggcggttgggatgatcgtcgatcagaaccagcagatcgccgccgccgtggagcagcaaacggcagtcgcccacgacatcgaccagaacatcgtcgaaatcaaccgcgccggcgagcatgcggcgcaaggtgcgcagcacacggaggcggccagtcggcaactggcaacccaggtggttgagttgaagcaattgattggcgcgtttcgggtgtagggaggttctgaaggactgagcggcgggccgtgtggcttatgtcctgatttaccgatgcgtgttttatcggggcgtgaataggtgaaaatttatttcatccgtcacggtcacgaggggacaaaacgatggccgccgcaatcggtatcaaagggcattgcgcccaatgcaacatgacgtttgagctcaagccctggcaactgaacgccatcgccattgatgtaccgtttgactgtacgtattgccactgcgggttgcacttggggtgcgtcaagcagttgcgccagttcagggccctggaccactgggcgctggtgcggccgagcatgatcatgctgacgtgcgcaaccttgctgatggcccttgtcgctgaatggttggggctgctcagtgtgatcgggcaactgaacatttcgctggtcgccgtgctgatccatttgctggtggtgcgctatgcccgccatcgacagagaatgaccttgaagttgcaggtgatcagtccgctaccagttgaacagctcgcacgcattgcgtgtgctcgcctcagccagcaataaagggctgatacccatgcgctcggccagggcggtgcagatgtctggcaggtgctgcgggctattgcgctggttggggtacatggccggggccatatccggcgcatcggtttccagcaccacggcgtcgagtggcaactgcgccagtacccggtgcatgcgcaacgcctggggccaggtggcagcgccgcccaggcccagtttgaacccgagcttgatgtactcgcgggcctcttcagcgctgccggcgaacgcatggatgatgccgcctcggggcacgcggatgcgcttgagggtggcaatcacggcggcgtggctgcggcgaacgtggagcaaggccggcagttggaaatccaccgcaagtttcagttgggcttcaaacagcggctgctggcgctcgtggtccaactgttccagaaagtaatccaggccaatttcgcccacggcgcacagttgccggtggccatgcaggcgcgtcaaccagtcgcccagctccagtaggtcggcggggcgatgctcatcgagatacaccgggtgcaagccgaaggcggcgaacaggccttcgtcctgttgcaccaagtcccatagccgctgccaatttttctggtaaacccccagcaccaccaggcgccgcacgccaagttcacgactgtgggcgaggacgtgcgagcgatcggggtcgaagtcctcgaagtccaggtgcgtgtgggtgtcgatcagctccacgctcaggcctcgtgaatacgctgcttgaaagtccggccaatcgcatgcaccccgggttggtactgttcctcttcaatggcggccagggccaggcgcagggcggtttcggcaatcaactgatgttgctgggccatggcgttgaccggcagcggcaggaaatccagcaactgcgtatcgccgaaggtgcccaggcgcaggggccgcgacttgagggggaagtcatgcagcgcgtcgaacacgccttgcagcagtacgtaggaggtggtcaccagcgcgtccggcagatgccccaggcgttgcagcagttgctccatcagctctcggccgcagtcacgactgaaggcttcgccctgctcgatgatcacgtcgcccgtaaagccttgcagcgcatcacggaaaccggcggtacgtgcctggctgatgctcagctcgggccgtgcgccgatcagcgcgatctgcttgggcaacggttgcagcaggctgctggtgagttgctggcaggcctggtggtcatcgctgaccacggagcagaactggttcggctccatctcccggtcgatggcaatcaccggcagccccttggcctgaagctcgcgatagctgtcatcgctggccggcaggcaactggcgacgaacaacgcatcgcaacgcctggcacggaacagttgcagcagttggcgttcgctgtccgcttcatcatcggagctggcgatcagcaactgatagcctcgcgcccgcgcaccttgttccagcagtttggcgatgcgtgcgtagctggggttttccaggtctggcaggatgaaccccaaggtgcgcgtatgccggctgcgcagcccggcggcttgagggttgggggtaaagccatgggcttggaccacggcacgcacacgctcaacggttgcgttgctgatgcgctgctgttcggctttgccattgatgacatagctggcggtggtaacggacacaccggccagacgtgcgatatcactgagtttcaaaccgggatttccttgttttttggagctcgccccgacattttgtccaatcgtaaccgattccagcattcgacccatgtcccacagcaagcgccgagtggcccttcaagcttgcacaattaacgcgtaatctgccataaattctagattaaacgtttcagcaggcgtatttttacgatgttcgccgctgagtgacccctgccaattgaccgctcagtcagttaattttgaacatatttacctacaacaatacctagtgcgcctgtcgcactaactaggagaacggcatgcttgagctcactgtagagcagatatccatgggccaggtggctgtggataaatctgctgccttgcacctgctcgctgacaaattagtggccgatggcctggttgccgaaggttatctcagtggcttgcaagcccgtgaagcccaaggctcgacctttctcggacaaggcatcgccattccccatggcacgccagaaacccgcgaccaggtattttccaccggtgtgcgcctgctgcagttccccgaaggggtggactggggcgatggccaaatcgtttacttggcgattggcatcgcggctaaatccgatgaacacctgcgcctgctgcaactgctcacccgtgccctcggtgaaaccgacctgggccaggccttgcgccgtgccaacagtgccgaagccctgttgaaactgttgcaaggcgcgccccaggaactggcgctggatgcacagatgatcagcctgggcgtgtcggccgatgattttgaagagctggtgtggcgcggtgcacgcttgctgcgccaggccgactgtgtgagcaatggctttgccgccgtattgcagcaggtcgacgcgctgcccctgggcgatggcctgtggtggttgcacagcgagcagacggtcaagcgtccgggcctggcctttgtgacgccggacaaacccatgcgctacctcggccagcctttgcacggcctgttttgcctggcgagcctcggtgaagcgcaccaaagcctgcttgaacgcctgtgtgccttgctgatcgaagggcgcggccaggagttggggcgcgccaccagcagccgcgcggtgctggaagtgctgggtggtgaactgccgccggactggccgagcgcccgcattaccctggccaacgcccacgggctgcatgctcgcccggcgaagatcctggcgcaattggcgaaaagttttgacggcgatatccgcgtgcgcatcgtcgatggcgcggtgggcgccgtgtcggtcaaaagcctgagcaagctgctcagcctcggcgcacgccgtggccaggtgctggaatttgtggccgagccgacggtggccggcgatgcattgcccgcccttttggccgccgtgcaagagggccttggcgaagaggtcgagcccttgcctacggtgagtgcacagccagcgcaggtcgatatcgaacccgtactcagcgcgccactgagcggtagccaactccaggccattgccgccgcaccgggtattgccatcggcccggcccatattcaggtgccgcaggtgttcgattacccgttgcgcggtgagtctgccgccgccgaacgccagcgcctgcacacggccttgagcgacgtgcgcacggatatccagggcttgatcgagcgtagccaggccaaggccatccgcgagattttcatcacccaccaggaaatgctcgacgacccggaactgaccgacgaagtcgacacccgcctcaagcaaggcgaaagcgccgaagccgcctggatgagcgtgatcgaagccgccgccaagcagcaggaagccttgcaggatgccttgctggccgagcgtgctgccgacttgcgtgacatcggccgccgcgtactggcccaattgtgtggcgttgagagcgtgcaggaaccgagcgagccctacatcctagtgatggaagaagtcggcccttcggacgtggcacgcctggacccggcccgcgttgccggcattctcaccgcccgaggtggcgccacagcccacagcgccatcgtcgcccgcgcactgggtattccggccttggtcggtgctggtgctgcggtgttactgctcaaagccggcacgccgctgttgctcgatggccagcgcggtcgcctgcatgtcgaccccgacgccgccaccctgcaacgggccaccgtggagcgcgacagccgcgaacagcgcttgcaagccgcttcggcccaacgccatgaaccggcgctgacccgcgacgggcacgccgtggaagtgttcgccaacattggtgaaagcgccggggtggccagtgcagtggagcagggcgccgaaggcattggcctgctgcgcaccgaactgattttcatggcccacccccaggcgccggacgaggccacccaggaagccgaataccgccgcgtactcgacggcctcaacggtcgcccgttggtggtgcgcaccctggatgtgggcggggacaagccattgccctactggccgatcgccgaagaagaaaaccccttcctcggtgtgcgcggcattcgcctgacgctgcaacgcccgcagatcatggaagcgcaactgcgcgcactgctgcgtgcagcggataaccgcccgctgcgcatcatgttccccatggtcggcagcgtggatgagtggcgcgccgcccgggacatgaccgagcgcctgcgcctggagatcccggtggcggacctgcaactggggatcatgatcgaagtcccgtcagccgccttgctggcgccggtgctcgccaaggaagtcgacttcttcagcgtcggcaccaacgacctgacccaatacaccctggccatcgaccgcggccacccgaccctgtcggcccaggccgatggcctgcacccggcagttttgcaactgatcgacatcaccgtgcgcgccgcccatgcccatggcaagtgggttggcgtgtgcggcgagttggcggcggacccgctggcggtgccggtgctggtcggcctgggtgtggatgagttgagcgtgtcggcccgcagtattcccgaggtgaaggcgcgggtgcgtgaattcagtctgagcgaggcccagggcctggcgcaacaagcactggcggtgggttcgcccgcgcaagtgcgtgccctagtggaggccgtgtagatggcgaatattctgaccctgacgctgaacccggcgttggacctcacggtacgcctggcgcacctgcaacccggtgaggtcaatcgcagtgaagcgatgctcacccacgcggcgggcaagggcgtgaatgtggcgcaggtgctggcggacctgggccattacgtcagcgtgggcgggtttctcggcagtgccaacccccaggcgttcaatgcgctgatcaagcgccgtgggtttggcgatgccttcatccgggttcccggcgaaacccgtagcaacatcaagattgccgaacaggatgggcgggtcaccgacatcaatgcaccggggccgctggtgactgaagaggcgctaaaagcgctgctcaagatggtcgcgatcattggcccggagttcgatgcggtcgtggtggccggtagcttgccgcgcggcgtcagcccgcagtggtttaaaggtttgctggaggcgttgaaggacctcggtctgaaagtcgccctggacaccagtggtgaagcgctgcgcctggggttggaggttggcccgtggctggtcaaacccaataccgaagagttggccgaggccttgggtagcaccaccgatgccatcagccggctgcatcagcaaggcatcgagcatgtggtggtctccgacggggccgcaggcgtgacctggtaccgcccaggtgcggcgctgcacgccacgccgcccaaagtggcagtggccagtaccgtgggcgctggcgactcgctgctggccgggatgctccacggtttgctcagcggcgatacgccggagcacaccctgcgccgggccacggcgattgccgcgatggcggtgacacagatcggttttggcatcagcgatgacgcgcagttggcgcatctcgaaagcggcgtcgatgtgcgcacgctgacagaacaataagagggtttgtgatgaagttagccattgttaccgcctgcccgaacggcatggtcaccagtgtgctgtgcgcccgcttgttggacgccgccgcccagcgcatgggcttgcacaccagtgttgaagtcgtcgatgtgcagcgcccggagcgccagttgtcccaggcgacgattgatgatgccgagtgggtgctgctggtcagcagtaccccggtggagatgcagcggtttgtcggcaagcgcgtgttccagagcacgccggcccaggcgttggcagatgtcgaaggcgtattgcgtcggggtgctgaagaggcccaggtgtatgtcgccaacgctgccccggtggcggccaaggctgcgccgcgtatcgttgcgattaccgcgtgccccactggcgtggcccacacgttcatggccgccgaggccttgcagcagacggcccagcgcctgggttatgacttgcaggtcgaaacccaaggctcggtgggcgcccgcacgccgttaagcccccaggcgattgccgatgccgatgtggtattgctcgcggccgatatcgaagtggccaccgagcgtttcgccggcaagaagatttaccgctgtggcaccggcattgctctcaagcaatccgaagccatcctcaacaaggccctggccgaaggcgcagtggaaagcgcggccagcggtgcagcggccaaggccgagaaaaccgggatctacaaacacctgctcaccggcgtgtcgtacatgttgccgatggtggtggcggggggcttgctgatcgccttgtcgtttgtgttcggcatccatgccttcgaacagcccggcaccttggcggcggcgctcaaatccgtgggtgaccaggcgttcctgttgatggtgccgctgctggcgggctacatcgcctactcgattgccgaccgtcctggcctggcgcccggcatgatcggcgggctgctggcgggcacgctgggggctggttttatcggcggcatcctcgccggtttcgtcgctgggtattgcgtcaagctgatcagccgcgcggtgcaactgccccagagcctggaagcgctcaagccgatcctgatcatcccgttattggcgagcctgtttactggcttggtgatgatctacctggtgggcccaccggtcgcccgcttgctcacgggcctgacggatttcctcagcaccatgggcaccaccaacgcggtgctgctgggcattctgctcggcggcatgatgtgcgtggacttgggcgggccgatcaacaaggcggcgtatgcgttctcggttggcctgctggccgcgtcgagcggcgcgccgatggccgcgaccatggccgccggcatggtgccgccgattggcatgggcatcgccacgttactggcccgacgcaagttcgcccagaccgaacgcgaggccggcaaggcggcgatgattttggggctgtgctttatctccgaaggcgcgattcccttcgccgccaaagacccgctgcgggtcattccggccagtattgccggtggtgcgttgaccggtgcgctgtcgatgtacttcggctgcaaactcgccgcaccccatggcgggttgtttgtgctggtgattccgaatgcgatgaaccatgcgttgttgtacttgttggcgattgtcgcgggcagtgtgttgaccgggctggtgtatgccgtgctcaagcgaccggaagcggccgagctggccgtgactgcctgacactggcaaaaaatgtgggagctggcttgcctgcgatagcatcgactgggtttgcctgatacatcgaggtgtttgcatcgcaggcaagccagctcccacaggtgaatttgatcgttctcccgattggtgtcacatccgcttcatcccatcatgcttaagtggcccttttgatactcaagagggcatcctgcatgagccacttcgatctcggccgccgccgtgtgatgcaagccgtaggcgctggcctgctgttgccgggcctggcgccggcggtgatcgcttcggtgaaggaccggccgcaactcacggacggcgtgcaatcgggcgacctgcagggcgatcgcgcgatgatctggagccgcagcgaccgcccggcgaagatggtggtggagtgggacacccgcagcgtgttcagcaacccgcgccgattcgtctcgcccctggccgacagccgcaccgactttaccgcccgtgtcgaactcaccgggctgccggttgaccaggcgattttctaccgcgtgcatttcgaagacgcccagaccggcattgccagtgaaccctggttcggccacttgcgcagcgtgccgcaacagcggcgcgatatccgttttgtgtggagcggcgacaccgtcggccaaggcttcggcatcaacccggacatcggtggcatgcgcatctatgaagccatgcgcctgcgcctgccggacttttttatccacagcggcgacactatctacgccgacggcccggtacccgcgcaactcaccactgaaggcgggcgcatctggcgcaacatcaccactgaagccaaaagcaaagtcgcggaaaccctcgatgaatatcgcggcaattaccgttacaacctgctggatgaaaacgtgcgccgtttcaatgccgaggtgccgcagatctggcagtgggacgatcacgaggtgattaacaactggtcatcgagcaagcagttggatgagcgttaccagacccgcgatatccacaccctagtgggccgtgcccgccaggcctggctggaatattcacccatgcgccgacagagcgccgacgctggtgggcgcatttatcgcaagctcagttatgggccgctgctggatgtgtttgtgttggatatgcgcagctatcgcgggccgaatgacgacaacctgggcgctgaaaaacccttcctcggccgtgaacagttggactggctcaagcgcgggctcaaggcgtcgcaagcgcagtggaaggtggtcgccgccgacatgcctattggcctgggcgtgcccgacggtgaagtcagccccggcgtggcgcgttgggaagcgatcgccaatggcgaccctggcccggcgcaagggcgtgagctggaggtcgccgaactgctggggttcctgcatgagcacaaggtgcgcaaccacgtgtggctgacggccgatgtgcattactgcgcggcgcatcactatcaccctgaccgcgcggcgttccaggatttcgagccgttctgggagtttgtggcggggccgctgaatgcgggaagtttcgggcccaacccactggataaaacctttggtccgcacgtggtattccagaaggcgccaccggcacagaacacctcgccgtttgcgggctttcagttttttggtgaagtgcagattgatgggcagacggcggagttgacggtgatgctgcgcgatctcgatggcgtctcggtgttcgagcaaaagctgcaaccggcctgatcgttcccacgctctgcgtgggaacgcatcctgtgacgctccgcgtcacgccgtcaagagcggacgcggagcgtccagggcggcattcccacgcggagcgtgggaacgatcaaggcaggcattagcggggtcagtagacatcccgacgatagcgaccctgttcgatcaggcgctccagcgcctcattgcccaagatgtctgccagtgcctgatccacccccgtcgccatcccttgcaagctgccacatacataaatcgccgcgccatccgccagccatttgcgcagcacgtccgcggattcgcgcaggcgatcctgtacgtagaccttctcctcttgatcacgggaaaacgccaggtccagcagggccaggtctccactggcgagccagccttgcagttcgtcctggcacaggtagtcgtgggcgatattgcgttcaccaaacagcagccagtttcgctgctggccatcggcaatacgcgccttgagcaagctgcgcaggccggcaaggccggtgccgttgcccagcaaaatcagcggcaccggcgcgtcgggtaaatggaagccgctgttgcgccgcaggcgcaggctgatggccgagccgagggcggcatgttcagtcagccagccggagccaagccccaggctgccgtcggggtggcgctcctggcgcacgatcagctccagcacgccgtcgctggcaatcgaggcgatggagtattcgcgcatgcccagggggaccagcgcatccaccaatgcctgggcgtgcaggccgaccaggtgcgtgcggttgtccggcagttggcgcgtggccagggcctgatcaagggtgtgggcgacgccgtcgatcaccacaccgtcgctgccgaccaagcccagtccggccaggaagtgttcgatggcccaggggcaattgcgcggcaggacttccaccaggtcgccggccagccagctgtgcgcagacgtggatgtgaggcccagcaggtagacgggcgagccgacactgtcggggttgagcagagtgcgttggctcagggtccagttttcgtactgggccgtcggccaggccgccgccggtgcatgcccggtgagctggcccaattgctgttgccaggcttgcaacgccaatgtgtcaccgctgtcgacttcaaccggggcaaacagcggggtgccgccctggttggtcagccagaaatgcaggcgccgggcaaagccgcaaaaatgctcgtactgccggtcacccagggccagcaccgagtagttcaagcctttgaggggcagcgcctggccgagcacgctgcgctcgaaaccacgggcgctgtcgggggcttcgccgtcgccaaaggtactgaccacgaacagggcgttttgcgattggctgaggtcgtcgcggctgacactgcccaggggctgcaccttcaccgccaggcccgcagcctgtaattgcccggccgtttgccaggccagttgttcggcaaagccgctctggctggcgaagccgatcagccaggccggcgcatcgctgtggttggctgccagacccttgcgcgcatcgcgtacctggcgctttttgcggcgacggtcgaggtacagcagccagccggtgatgaaaaacagcggcatgagcaatgagctgacggtgaggacgatccgcccgaccaggccaaaatagctgccggtgtgcagcgcatacacactggtcagcaactgcgccttgaggcttttgctggcgtagcgctcgtgggatttgacctcgccggtggccgggtccaggttgatctggttcagcgcgcggtcatggggcgatgaagagagcaggtaatacacggtggccggttgcccggcgaccgcaggcatccgaatgttgtaggcgctcaagtcggggccggcgttgctgtagatgctgctccagatcgcatcgtagttggccactggagcggggcctgcaggggctgggccgcgcttgcgcatgcgctcgttctgcggcgagtcggacagcagttgggtcacgccacggttgtaccagtcgtaggaccaatacagcccggtcagcgccgccaacaggtaaaacagcaggcaccaggtgccgaacaccgagtgcaggtcccaattgaagctgcggccctttttgcgccagtccagggtcagccagacgcgccagcttttcacctggcgtggccagcgcaggtacaggccggagaggcagaagaacagcagaatcagggtgcaggcgccagtgatgttgcgcccggtgtcgccgatggcgaggaagcggtgcaattgcaggataaagccgaacagatcctggccgacggcgtcgcccatgtagtcgccggtgtacgggtcgaagtagcgcatctggccacggcgctcgcccggtggcggagtgaaggacacacggccggcgttgccgctttcgctttctacccacagcatggccacggtcttgccttcggtggcttccaacttgcgcaccagctcggcgggcggcagtacaccggcctcgcgtttttgcacgctcaacacgctggggttgagcgcccgcaggatctcgtcctggaacgagtacgcggccccggtgacccccatcaaggccagcaccagcccggccgtgatgccgaagaaccaatgcaactggaacagggttttcttcaacacgtcgcaccgcctcgctcatctgatatctgggtcacggcgcgcattatgccgtgggttatcaagaaaaattctgttttacacacaaaagccccacgcatccgatgcgtggggccttgagcgaaccttgaccgcttttagaagtggaagctggtggtcaacaacgccgtacgaccggccgcctggttggcgaagtgcgccgagtaggccttgtcgtagtaggtcttgtcggtcaggttctgcacgttcaattgcaggtcgacgttcttggtcagcttgtagctggccatggcgtcgtagcgggtgtaggacggtacatacacggtgttgccggcatcgccgtaaacctcatcgacgtagaaggcaccaccgccgacggtcaacttgggggtgatgtcgtaggtggtccacaggctgaaggagttcttcggcgtgttgggcatttggttgcctttgttggagccggcactgactacgccgttacgcccgttgaggccggatttgaccaactcgctgtccaggtaggtgtacccggcgaacacttgccattgatcggtgagcttgccgctggccgacaattccacgccatcgacctgcgattcacccgcgttttcgtaggtgagtgcatccaccagaatgcgtgtgttcttcttctcggtacggaacactgcagcagtcagggacaggcgatcgtggaacaggtcccactttgtgcccagttcgtagttgacggtttcttctggctgcaagtcgctgctggcggcaccggcagacagcggattgccgtcggcgccttcacctaccaggccaccagccggtgaggccgaggtcgcgtaggaggcgtagatgctgccattttccactggcttccagaccaggccggcctgccagttgaagaactggctgtcttccttgatcttggtgcgcccggcggcggcgttggtgttggctacggtgtcaaaggtgtcgtagcgcaaccccacgttcagcagccatttaggatcgagctcgatggtgtcgaacacgtacgcggcgcggctggtggccttggtgttggtgccgttgtagttgcgggcgatgctgccgttccaggcatcgtcggggtttgggttgctcagtgaggtgcactggccgcccacgctgcccttggccgttgtgcaaaccgggttcgagttggggctgacggtatagccgctgacacgggtttcttcaccggtgaattccaggccggtggagtaggagtgcttcatccccgccagttggaagctgccgaacagatcggtctggttggtggtggtcgtcgtagtggacacgcgactgttagcccgacgccacacagtgccgaactgattgacgttgtgctggctgtcatcaggctgcgtcaatacgtagtcctggccggtgctgccatgacgcagggtgttcttcagcgtcatgttgtcgttcaggtcgtgttcaatggagaacgtgctgatatcggcgcgggttttacggaagtcgcggtgttttaaaccgtagaagttgttgctgtcgccgccgtcggtaggtttgtcgtgtacatgggccgcacgtgctccgttggagctgtagccatacggaatccccgaatccggcaggtcatcactttccatatggtagtagctgaggttgacgcgggtcggtgtgcccaggccaaaggtcagcgacggtgccacgccccaacggtcgtagttcaccgcatcgcggccagccacgttttgttcatggctcatcaggttcaggcggaaggccgcgctgtcgtccaggaactggcggttcacgtcgagcacgtagcggcgggtctggtcggagccgtaggtaaagccgccgttggtgaagtcccgcgcttgtggggtcttgctcaccaggttgaggctgccaccggccgagccacgtccgccgaacgaagagttcgggcctttgctgacttcaatggactcgatgtcgaagatctcgcggctctgaccgccggtatcgcgtacgccatcgaggtaggtatcgccctgggcatcgaaaccacggatgaacgggcggtcgccctgagggttgccaccttcaccggcaccgaaggtgatacccggtacggtgcgcaaggcatcctgcaacgaggtggcggcggtgtccttgagtacttgttgcggcaccacggtgaccgaacgcggcgtgtccaccagcggcgcggtgtatttctgcgacgaggctttttccacctggtaggaggtgttgtcctgatcctggccggtgatgttggtggcgccgagggagatagggttgcgctcgccttttggctcggtattttcagccgcctgcgccaggtgggcggcggagccggcactcagggcaacgccgatggccgaagccagcatgcgtggtgaactgaccggtatttttagaatagtgcgcgacatgacgtgtcccttccccaaggttgtgaggtcgcggaatatagggccaacaagactttgtatcaattgcgagatattgctattcgcatcaaatttacattctttacactttttctttacggattttgtgttctcgttcgtccccgcgttttacagggcggataagaatcaataccattgacgcctctctgatcgcaggtattgcccccatgttgctgcacattcccggcctgttctctcgcgaggaggtgctgcgcattcgccaggccctggaagagaccgaatgggctgacggcaaaatcaccgccgggcaccaatccgccaaagccaagcacaacctgcaattgcccgaaggccaccccctggccaaggaaatcggcgcggcgatgctggaacggttgtggagcaacccgctgttcatgtcggccgcgctgccgcataaagtcttcccgccactgcttaactgctacaccgcaggcggcagtttcgactttcatatcgacaatgcggtgcgccaacccaaaggcagccatgagcgcgtgcgcaccgacctttcgtccacgctattcttcagcgaccccgacgactacgacggtggggaactggagatccaggacaccttcggcctgcagcgggtcaagctacccgccggcgacatggtgctgtaccccggctccagcctgcacaaggtcaacgcggtgacccgtggcgcgcgctatgcctcgttcttctggacccaaagcctggtgcgcgaagacagccagcgcaccttgctgttcgagatggacggcgccattcagcaactgacccgcgacgtgcccgaccaccccgcgttgatccagctcaccggcacctaccacaacctgttgcgccgctgggtcgaggtctgagcatgggctttttattgcgccgcgaagaagtgctcaacgtcgagcaattacaaagcatgctcgatgattccccggtgcgcgccgcccaggccatcctgatcgccgccaaggcaggggtggtcgatgcccaggccctgctcgggcaaatattgctggaagggcgcggcattgcccgcgatgaagccttggcactgcgctggttccagattgccgcgcagggcggtcacctgatggcgcgcaatatgatcgggcgttgccgggagcatggctggggctgcgctgtcgatgaggccgccgcagcacgggaatatcgcctggcggcacacgccgggttggattggggccagtacaactacgccaacctgttggctaccggtcgcggcatggagcaagaccaggcccaagcgctgacgctttatcgccaggccgcagggcagggccacgccaagtcgatgaacctgctggggcgttatctggaagacggccagtattgccccagggatctagagacagccgtagaatggtaccgacgctccgccgaagccggggattttcgggggcagttcagctatgcagcggtgctggcggacagagggcagatcgacgctgcgctggaatggctgcgcaaggctttggcggctgggaatttcaaattcctgcgaacggcgcataaggcgctggcacaggccaatgacccgcagattcgcgccatggccgaggcttatcaagggcacgcggaccaattggagaaaacgctgtaggaccccgtttctacacattcacgtgttccggtttgtcgatgaacggcaaggatcgaaggttgaagctctggcttaagtcactatgattaagcttgaatcatttttaatcgcctgcttgtcatttatccgcagagagagttttcatgggtgccgaaaccaaagtaatgacagctcatattcccactgcccttgctcagaaagttgaccagattgccgcgcgaatggatcgctcacgcggatgggtggtgaaacaggccctcgctgattgggtcgatcaagaagaagagcgcagccggctgacgcttgaggctatggcagatgtagatgcggggcgcgtgatcgatcaccaggcagtgcaggcctgggcagatagcctgagcaccgattcgccgctaccggtaccgcgctgatggagctgaggtggacaagtaaagccttatccgacctggctcgattatatgacttcctctctgttgtaaaccgcgaagctgccgcccgcatcgtgcagtcactgtctcaagcgcctgacacgctgctcgataatccgcgcatcggtgagagaattgaagagttttcaccgcgcgacgtaagaagacttttagtcggccattacgaaatgcgctacgaaattcaacagtcgacactctatattctacggttatggcacgttcgcgaagatcgctgagggcgcgtaccacagacagaaaaaagcccatgaaacgtcatgggctttttagttataaccgtcttattacacgtaaaacgacttcaacggcgggaacccattgaattccaccgcgctgtagctggtggtgtaggcaccggtcgacaaccagtacagtcgatcaccaatggccaggttcaatggcaggccgtacttgtagttttcgtacatgatatcggcgctgtcgcaggtcgggccggcgatgaccacttcttccatctcgcctttcttctcggtccagatcgggaacttgatggcttcgtccatggtttcgatcaggccggagaacttgcccacatctgtgtacacccaacgctcgacggcggtacgggacttgcgcgccaccagtaccacttcgctgaccaggatgccggcgttggcgatcagcgaacggccaggttccaggatgatcagcttcagctcgatgccgtcttcttctttcaggcgttcgaagatcaccttgaccttggcgatggccgcgtcccacacgctgatgtcgcgctgttgcgagccaacgtggaacgagatgccgtacggcaccaggcccaggtcgcgggcgaggatcagcaggtccatggccatgtcggtctggcaaccgaatttgcgcgacaacggccagtcagcagtggtggagccttcggtgaggatacgcacatacactttcgaacccggcgcggccttggcgatgttgcgcaggtcggcttcggagtcggtggagaacaggcgcacgcccttctcatagaagtagcgaatatccttggatttcttgatggtgttgccgtagctgatacggtcggcgctgacgccgcggtccatgaccttgtccagctcgtagatcgaggcgatgtcgaagctcgaacccttgtctttcaacaggtcgatgatctccacggccgggttggccttgacggcgtaatacaccttggcgaattcgaaaccggcgcgcaggtcatcgtaggcctggctgatcatcgcggtgtcgatcaccacgaatggggtttcttgtttgtcggcgaacgccttcattttgtcaaaggtggcgcgcgcgaaataatcttcgacgttgatcgacatgctggggaactcctaagggcaaactgtattgatcaatgggtgcaaatgaacgtcctccgtatccccactttggttcgcctacttcccaaggcatgtcgccgaaagcaaaaaggccacggggtaagctgcccttggccttgctgtctcgtcgtcagtacttgagccggatggatcgtttccagcatggacgttcggcgcgaactttagggcttggcgggcgtgggatcaactaaaaatgtcgcgtttttgcacgcgttcgtcgcgcggccgcgtgcagctacttatgtaaccgaccggtgtgacggattgatgttccccggatggggctaatcagatggatttgcggtgtattcatcgcaggcaagccagctcccacatttgaactgcattcttatgctggaatgcattcccctgtgggagctggctcgcctgcgatagcgatctatcaggccaaagcagtttcggcaggggagacaatgctggtcttgcccccacgggacttaccggaactcaggtactcggcaatcgactcctgggtcacctcacccaagaacacccgctctgcatccatcaccggcaaccacgaacggttgaactcgtacatgcgcgacagcaggatgcgcaaatgctcgtcataggccgccgtggcattgaactcgcgcaggtactggccgcaggtgccggcctggcggtgcaggtcgcgacggcgaacatagcccagcgctttgttttcggcgcaggtgaccaccacgtaacggcggtcatgctcgtccatcagttccagggcatcggccaccggggtttccgggctcaccgacggggcgttgtccgccgcgtcttcggcttttaccagcagcaggcgcttgagggtgctgtcctggcccacgaagttgctgacgaactcgtcggccgggtgcgccagcagcgtatccgggtggtcgatctgcagcagtttgccggcgcggaagatggcgatcttgtcacccagcttgatggcttcgtcgatgtcgtggctgaccatgatcacggtcttgttcagcgcgcgctgcatctcgaagaactcgttctggatcatctcgcggttgatcgggtcgaccgcgccgaacggctcatccatcagcagcagcggtgcgtcggccgccagggcgcggatcacgccgatgcgctgttgctgcccgcccgacaattcacgcgggtagcggtgcaggtactgcttgggctccagcttgatcatgctcatcaactcgcgggcgcggtcgtggcatttctgcttgtcccagccgagcagcttgggcaccaccacgatgttctcttcgatggtcatgttggggaacaggccgatctgctggatcacgtagccgatgttgcggcgcagggttacttcatcgaggtcggtggtgtcttcgccgttgatcaaaattttgcccgaggtgggcttgatcaggcggttgatcatcttcagcgtggtgctcttaccgcagcccgagggccccaggaatacgcaaatctcgccttcgttgacggtcaggcttacatcgttgacggcagtgacagtcttgccgttgctttgaaaagtcttggacaggttttgaagttcgatcatttgagcaatccttttggagtcagcgagcgttgcagccattgcagaagcaggtcggcgaagatggccagaagactgaccagcacggcgccgacgatcagcatcgacatgtcactgcggctgatagaagccagaatcagtacacccaggccaccggcgccgatggtggcagcgatggtcatcacaccgatgttcatcaccacggcggtgcgcacaccggcgaggatcaccggcaccgcaatcggcagttcgaccatgcgcaggcgctggccgaaggtcatgccgataccgcgtgcggcttcgcgaatgcctggctctacgccggtcagcgcgaggtaggtgttacgcatgatcggcagcagggagtagaggaacacggcggtgatcgccggcatcggccccaggccctggccgaacttggagtagaacggcagcagcaggccgaacagtgcaatggagggcacggtcagtagcaccgtagcgctggcttgcagcgggccggccaaggttgggaaacgtgtcatcagaatgcccaggggcacaccgataaagatcgccaggatcacggcgatgccgaccagggtgatgtgctgccaggtcaagtgcagcacttgggcccaatcaagatgggaaaaggcgttcaaaaattccatgtcttctcctttttagttgattggatgttggcgcaggaaatcggcggcaacggcggacgggctttcatggtcgacgtcgacccgtgcattgagctgacgcatggtttcatcgtcgaacagattggccaaaggcttgagctcggcagccagttgcgggtgcttgtcgaggtattcctggcggatcaccggggctgcggtgtagtcggggaagtagtgtttgtcgtcttccagcagcttcaatttaaaggcgttgaggcgcccgtcggtggtgtagaccaaaccggcgaacacctggccgttacgcagcgcggtgtagaccaggccggcgtccatctgccgggtgttcttgcgcgtcaggttcatgtcgtacagcttgaccatgccggccaggccatcggagcggttggcgaactcggtgtccagggcgaccaggcgatgctctttggtctcctgggccatggcttgggtgaggtcgctgatgctgttgatctcgggatgttcttgcgcgactttctccggcagtgccagggcataggtgttgctaaagcgcgacggcgatagccagaccaggccttttttcgcgtcgagttctttgacccgtgcgtaggactgttcgctgtcgagtttctcgtcgatatggttgtaggccaccagtgacacaccggtgtattcccagatcaggtccagttgcccgctttcctgggcactgcgcgccaggttgctgcccaggccaccggtcacacgggcgtcgtagcccttggtgcgcaggtactgggaggtgatttcggcgagcagggtctgctcggtgaacacccgggcgccgatgcggatcaggggtttttcggcggcttgtgcaatacctgcaagcagcaggacgcagcctaatatcaagctcagttttttcatgtgaattcctttaccgggcttaagacgggcgcaacccgcgttccagccagaggcggctggccatggttaccaggccgtcaagcagcaatgccagcagcgcggtacacgcggcgccgagcaacagttgcggctgattgttcagggcaatgccggggaagatcaggctgcccaggctgttggcgccaatcaggaaggccagcggcgcggtgccgacgttgatcgccagggccacgcgcacaccgccaatgatgatcggcacggcgttgggcagctccacgcgaaacagcacctggcgcggggtcataccgatgccggtggcggcttccttaagggagccctgaacgtttttcaggccttcgtaggtgttgcgcacgatgggcaggagcgaggcgaggaacagcgcgaagatggccgggccgctgccgatgccgaggacgccgagggcgatggccagtacggccaggggagggacggtgttgccgatgttgaagatctgcatgaaacgttctgcgcgcccgaccatattgggtcggctgagcaggataccggcggggatgcccacaatcagggctgccagcatggagactaggacgagaatcagatgagcttgcaggtaaaacaacaaatcgtcgcggtacagttcgatcgtgttgatgccgatccagtggaccagcagggccaggagagcgacgacaaccactgctcctatcagccctttgccatagcgaatagccacaggcggactcctttttttcttctgtcggcgaacacatttccgagcggcagggccatgactggctgccttggaatgggttcgcgaaaagcaactcgccgatactggcaatgcagtatgcgatcgagccatgagcgcagcctcgtcaggctaacttgctgatttttcagcccctgttccgagtgcgatagcaggggagtggacgtctctaccttttaaaaggttccacacttgggcgcatttagccacccccaatgggctcaacggtggtccgtaccctcgcgtttgcgctatactcgccgcccttttttgactcacctgccaggcgatttcccatgacccaccaggccgccgaagtcgcgaaacgccgcactttcgccattatttcccaccccgatgccggtaagaccaccatcaccgaaaagctgttgctgatgggcaaggcaatcgcggtggccggcacggtgaagtcgcgcaaatccgaccgccatgccacctccgactggatggaaatggaaaagcaacggggtatttccattaccacgtcggtcatgcagttcccctatcgcgagcacatgatcaacctgctcgacaccccggggcacgaagacttctccgaagatacctaccgcaccctcaccgcggtggactcggcgctgatggtcctcgacggcggtaaaggcgtcgagccacgtaccatcgcgctgatggacgtgtgccgtctgcgtgacacgccgattgtcagcttcatcaacaaactcgaccgcgacatccgcgaccccatcgagctgctggatgaaatcgaagccgtcctgaagatcaaggccgcgccgatcacctggccgattggttgctaccgcgacttcaagggcgtgtaccacctggccgacgactacatcattgtctacaccgctggccacggtcatgagcgcaccgaaaccaagatcatcgagaagctcgactccgatgaagcccgcgcccacctgggcgacgagtacgaccgttttgtcgaccagctggagctggtgcagggcgcctgccatgagttcaaccagcaggagttcctcgacggccaactgacgccggtgttcttcggtaccgcgctgggcaacttcggtgtcgaccacgtgctcgacgccgtcgtggactgggcgccaaaaccgctggcccgcgttgccaacgagcgcaccgtggaaccggtcgaagagaaattcacgggctttgtgttcaagatccaggcgaacatggaccccaaacaccgcgaccgtatcgccttcatgcgtatctgctccggcaaatacgaaaaaggcatgaagatgcgccacgtgcgcactggcaaggacgtgcgcattggcgacgccctgacgttcttctcctccgagcgtgagcagttggaagaggcgtttgccggcgacatcatcggcctgcacaaccatggcaccatccagatcggcgacaccttcaccgaaggcgaagcgctgggctttaccggtatcccgcactttgccccggaactgttccgccgcgtgcgcctgcgtgacccgctcaagtccaagcaactgcgccaaggcttgcagcaattggccgaggagggcgccacccaggtgttcttccccgagcgcagcaacgacatcatcctcggcgccgtgggcgtgctgcagttcgatgtggtcgccagccgcttgaaagaggaatacaaggtggagtgctcctacgagccgatcaccgtgtattcggcgcgctggattgattgcagcgataagaagaagttggaagagttctccaataaagccgtggaaaacctggcaatcgacggcggtggtcacctgacctacctggcgccgacgcgggtgaacctggcgttgatggaagagcgttggccggatgtgaagttccgtgcgacccgcgaacaccattaaggtctgagcggttaagagaatgtgggagggggcttgcccccgatagcggtgtgtcagccaatgtattgggttctgatactccgcaatcgggggcaagccccctcccacattttgatctccaaaaggctggagattggcggtaaaccggcatcgcgactagcttaaacgctggtggcagttaatgactgccgtgcggggcccatttactgactggacggaatcgatcatgagtatttttcaacgaatagtgctgttgatgaaagtgctggtgctgttgtcgttggggatgtcgacggcctgggcgcataacccggtgcagggcgcagcgagggtgacgagtagccagagctcggacttgcaactggccaagtccgaagcagagccaggcgataaaggccagggtggcagcgaagacgatgacgactcgaccaccgacgagcctgacagcgacgacgcagacgaaggcgatagccagacgtaggttcgccaagggaaagcgtttcaaacaatcgatgccttggatgggacctccaaggcatttttattggccgccctttttcctcagaacgatgtggtcaccgacgcgaagtaagcccgccccggctcattgtaagtctgcgcgcccgcatcctcggcgttgcctttgcgcgacaagcgcttgtctagcaggttgttgatgcccacccgcacgctcaggttcttgctgaattcgtaaccactgctcaggcccatcagcccgtacgggtcgacgtcctgctgggcgctgcgatcgtaactgctggcgctgcgtgagttgagcgtcggcgcctcctgcttgccgtagtaggtgccgctgacctggaaggacagcttgtcagtggcttgccagtccagcgtggtgttgacggtgtacttggggatgatgctcaagggctcgccggtgtccttgtccttggagtcgatcatgtaggtcaggttggtgttcaagtccagatcatcgcgcaggctgatgaacaggttgccttcaacgccctgcaccaaggcgggcccgctgttttcccactccagcacgcggcgaccgttgcccaggcggaaggccgcctcgttactggcgttgatcttgttcttgtagtcattgcgaaagtacgtcgcactggtgcgccagttgcctttgtcgaaagccaagccaatctccttgttgacgctgatttccggcttcagatcgcggttgcccaccaggtagcaaccgcccatgttggcttcgctggcgttgcagccattgccacggctgtagagcaaatagttcgggttggactggtacaggttaggggtcttgtaggcgcgggcaatgccgcccttgatgctcagttcgtcggtcaactggtgcgaagcgttgaagctggggctccagttgccgccgtattcctcatggtcgtcgaagcgcaagccaggcgtgatcacggtcttgctgcccagctcgatgttgtcctcggcaaacaaggcgtagcttgaggcggtggtcttggtgctgttgcggctgacgcccgggatggcggggacgccgccggtgcctgggtcgtaagtttgcgggcgcaacgagcctgggtcgttcatcgactcgtagaggtattcgctgcccagggtcagcacctgctcggcaccgacgctcaggggcaggttgacctcggcggtggcccgcgtgttgcgcaagcgcgactcgaaacggcctgcactggcggagggcgcaccttcgccagaaccggccaggccttcattgaggcgttcgttgcgggtcaggtcgtgggtcagcgaggccagggtcgaaccccagtcgaattcgccgcgatgggtggcagaaaagctgctgcgttgaatcacactggtttccttgcccaccaggctttccacgaacgcgccaccgccgttgagcatggtatcgccggcgaaaatattgccctggcggctgtagctggcttccaggtcgagggtttgctcgggggtgaactgccagctcagcaagccattcacgtctttgttgcgcacaccttcgcggccggctaccaacgagtccggcgtcgcttgcgctgcgcggttgatgtcggcgtcatcggcgtcggtcttgttcaggccgccatagacgcggaacgccagggtgtcagtcaatgggccgctgaggttgaagttggtgcgcttgctcgcgccttcggcatcgttttcggggaaggcggtgtaggcggtcagcgagccgtgcagttggtcagtggggcgcttggtgatgatgttgatcaccccgcccatggccccggagccataacgggcggcggccgggccgcgcaggatttcaatgcgttcgacttcttcggccggtacccagttggtttcgccacgggtatcacggtcaccgctccagccgtaacgcaccgcgttgcgcgaggtggatggcttgccatcgatcagaatcagggtgttttccgggcccatgccgcgcaggtcgatctggcggttattgccacgactgccgctggaactgttgccggtcaggttcacacccggctcgcggcggatgatctccgaaaggtcgttagtgggcgggcgtttcttgatgtcttcggcggtgatgatcgacacgccgggcgcttgcttgagttcttcggcggcggtgcccagtacacgtgtctcgcccagcaccagggcttggggcgtgccatccacaggcaggtctgtcgcttggatcggcactttgtcgcgctctttttccacaccctgcgccagtagcgcgggggacgaaagggtagcgataaacgccagcgagagatggctgagcctgaattgagacgacatgtccacaaagtcctttaggaggggcgattgaacgagaggcgtctgaattttttcgtgtatccagcgctctccgtgcgccgtaatggtattgattctcaaacagaagtaaattgcatttacaatctatacacttttcaaaacggtctggctcaatgttttcagggcttttggcatagattcaaacggtatgttttttgttacaaccgcgcaaaaaaagcccctccggccagactgatgcgcaatctggcgggaagggcgatggagctcatttaaaccgctgcgcctgtaggagcgagcaagctcgctcctacaggggaggttgtgttgcttcaggccacgaattgctccgcgtagtggcatgccacctgccggttatccaacggacgcaacagcggctcctcactgctgcaacgcgccgtcgcatatgggcagcgcttgtggaacgcgcagccaggcggcgggttcagtgggttgggcagttcgccgacgatcttgatcttcggcttgcttgggtcggggtggatggtcggggtggccgacagcagcgcctgggtgtaagggtgcagcgggcgtgcgtagatgtcttccttggggcccacttcaaccgggcggccgaggtacatcaccatcacatcatcggcaacgtgctgcaccaccgccaggttgtgggagatgaacacgtaggcggtgttgaattcctgctgcaaatccatgaacaggttaagcacctgggcctggatcgacacgtccaacgccgaggtcggttcatcggccaccagcactttgggctgcagcatcatcgcccgggccaacgcgatgcgctggcgctggccgccggagaacatgtgcgggtagcgctgataatgctcagggcgcaggcccacttgcttcatcatcgcctgcactttctcgcggcgctcagcggccgacaggttggtgttgatcagcaacggctccgccagttgatcaccgactttctggcgtgggttcaacgaggcataggggctctggaacaccatctgcacgtctttacgcaattgcttgcgctgggccttgtcggcgccggccacttcttgcccggcgattttcaacgagcccgacgagggctcttcaatcagcgtcagggcgcgggccagggtggatttgccacagcccgactcgcccaccacggcgagggtcttgccggcttccagctcaaaagacacaccattaagagcacgcacggtggcatggcccttgaacaagccacgggacacttcgtagtgacgggtgaggtcgcgggcggtaagtacgacggccattacgccacctcctggttcagcgggtagaagcagcgggcaaggctgttgcttttcgggtcaaggcccggccgctgggcgcggcaggcgtcctgcacatacgggcagcgcggcgacagcaggcaaccctgcggacggtcatagcggccgggtacgatgcccggcagcgtggccaggcgcgtagcgccgaggctgtgctcgggaatcgccttgagcagcgcttcactgtacgggtgtgccggaatgtcgaacagctgcggcacctggccgacttccacggcttggccggcgtacattacgcacacgcgctgggcggtttcagccacgaccgcgaggtcgtgagtgatcagcaccaggcccatgttctgctctttttgcagggccagcagcagttccatgatctgcgcctggatggtcacgtccagcgcggtggtcggttcatcggcgatcagcagtttgggctcgccggcaatcgccatggcaattgccacgcgctggctcataccgccggacagttggtgcgggtaggcatccatacggctggcagcgcctgggatctcgaccttttccagcagctcgatggcgcgtttgcgcgcttgtttgccggacattttcagatgcaggcgcagcacttcttcgatctggaaacccacggtgtagctggggttcaacgcggtcatcgggtcctggaataccatcgccaggtctttgccgacaatctggcggcgctggcggttgctcaacttgagcatgtccttgccgtcgaagttcagcgcatcggcggtgacgatgccgggatgctcgatcaggcccatcagcgccatcatggtcacggatttacccgaacccgactcgccaacgatcgccaggacttcgcctttgtcgacggaaatgtcgaggccatcgaccaccggcacggcggtcttgtcgccgaagcgcacgttgagattcttgatttctaacagtgacatgggaatctcctcaggcggcgttcttgagtttcgggtccagcgcatcgcgcaggccgtcacccatcaagttgattgccagcacgctgagcaaaatggtcaagccaggcaggctcacgacccaccaggcgcgttcgatgtagtcacgggccgaagccagcatggtgccccactcaggggttggcggttgtacgccaaggccgaggaagcccagggccgcggcatcgagaatcgccgaggaaaagctcaaggtcgcctgtacgatcagcggtgccatgcagttaggcagcacggtgatgaacatcaggcgtggcaggccggcgccagcgaggcgggcggcagttacgtagtcgcggttaagttcgcccattactgcggcgcgggtcagacgcacgtaggacggcagcgacacgatggcgatggcgatcacggtgttgatcaggccagggccgaggatggcgacaatcgccacggccagcagcagcgacggcagggccagcatgatgtccatcaggcgcatgatggtcgggcccagcaagcgcgggaagaacccggcgaacaggcccagcaggatgcccgggatcagcgacatcaccaccgacgacaagccgatcagcaacgacaggcgcgagccctggatcaggcgcgagagcaagtcacggcccagttcgtcggtgcccagcaggaactgcatctgcccgccttccagccacgccggcggcgtcagcaggaagtcgcggtattgctcgctggggttatgcggggcaacccacggggcgaagatcgcgcagaacacgatcagcaacatgaacagcaggccggcaaccgcgcctttgttcttggagaaggcttgccagaattctttgtacggggacgggtacagcaggctctgatcgactgctgacacttgagtaggtgtggtcatggtcatgatctcagcgctggtgacggatgcgtgggttggcgaagccgtagaggatatccaccacgaagttcaccaggatcaccaggcaggcgatcagcagaatgccgttttgcaccaccgggtagtcccgcgcgccaatggcttcgatcagccatttgccgatgccgggccacgagaagatggtttcggtcagtaccgcaccggccagtagcgtgccgacttgcaggccgaccacggtgagcaccgggatcagcgcgttgcgcaggccatgcacgaacaccacgcgggccggcgacaggcccttggccttggcggtgcggatgtagtcctcacgcagcacttcgagcatcgacgaacgggtcatgcgcgcgatcaccgccagcgggatggtgccgagcacgatggccggcaggatcaagtggtgcaatgcgtcccagaacgcgtccggctcgtcggccagcagggtgtcgatcagcatgaagcccgtgcgcggctcgatgtcgtagagcaggtcgatacgcccggaaaccggggtccagcccaggcttaccgagaagaacatgatcaggatcaggccccaccagaagatcggcatcgagtaccccgccagggagatgcccatcaccccatggtcgaacagggatcctcgcttgagtgccgcgatcaccccggccaacaggcccaggataccggcgaacaacagcgcggccatggacagttccagggtcgcggggaagagggcggtgaactcggtccacacgctggtgcgcgtgcgcagcgattcgccaaggtcgccctgggcgagcttgccgacatagtccaggtattgcgcatacagcggcttgttaaggccaaggcgctccattgcctgtgcgtgcatttcggggtcaacccgtcgctcgcccatcatgacttctacggggtcgcctggaatcatgcgaatcaacgcaaaggtcagcaacgtgatgccgaagaacgtggggatcaataaccccagtcggcgggcaataaaactaaacatcttggtgtgtacctcaatcagccggttaggcaggtccggcaccgtcagtgtcgacgatgccgagcgtttttcttatttacttcacctgggtggtggcgaagttattggtggtcagagggctttgggtataaccctcgacgttcttgcgcatggcggtaaacattttcgggtaagccatgggaatccacggttggtccttctcgaatacggccaaagcttgttcatagagtgcggcgcgttcggcgggttcagcgtcggcgcgggccttgtcgatcaagtcttgaaactctttgttacaccagcgggcgtagttttcgccgtttttcgctgcatcgcaactcaggtttggggtgaggaagttgtccgggtcgccgttatccccggcccagccggcagaaaccatgtcgtgctcgccggctttggcacgcttgagcatttcgccccattccatgaccttgatattgaccttcaggccgatctgggccagatccgcctgcatgcgctgggcgccgagcatcgggttagggttggtcgggccgccgccgttgcgggtgaacagggtgaactcggtgccttccggtacgccggcttccttgagcagagcgcgggctttgtccaggtcgcgaacagggttttttagcttgtcactgaagcccagcagggtcggcgggtacgggccggtggcatcgacggcgttgcctttgccgtacagcgattcgttgtagccctttttatcgaaggcaatattgatcgcgtgacgtactcgcgcatcgctcatgtacttgtgggtggtattcatggcggtgtagctggtggtcatcgccgccagttccgccactttcaggttgggatcagccttggcgctgggtacatcatcgggcttgggatacagcgcgatctggcattcgttggccttgagcttttgcaggcgcacattgctgtcggtggtgattgccagaataaggggatcggccggcggcttgccacggaagtactccgggttggccttgaagcgcacttgggcgtctttggcgtagcggttgaagatgaacggcccggtgccgatcggcttggcgttcaggtcatcggtcttgccggacttgagcaattggtcggcatattcggcggagtgaattgaggaaaacgccatggccaggtcggccaggaagggggcttcaggacgggtcagggtaaacacgacggtgtggtcgtcggtcttctctacgctcttgagcagttctttaaagcccatgctttcgaaatacgggtaacccacagcggactttttatgccaagggtgattcgggtccagctgacgctggaagctccaaagcacatcatcggcgttcaggttgcgcgtgggtttgaaatagtcggtggtgtggaacttgatgtcgtcacgcaggtggaaggtgtaggtcaggccatcggcgctgatttccggcaggtctttggccagggcgggcaccacttctgtggtgccgggcttgaagtccaccaggcggttgaacatggtttcagcggcggcgtcagcggtcacggcagtggtgtacaggaccgggtcgaaaccttccgggctggcttcggtgcagaccaccagcggtttggccgaaacgccgatcgccacgctcaacagcgcagcggccatggcggcttgtagtgggagcattttcattcagagccctctgcaatcgatggaaccagaaaagcgtaggcggcgggctcgtcctgagctcgccgcctgcctggcactaattaaaggatgttgaacgggatggtggtaaccagacggaactctttgatgctgccgtcggactggaactcgctgccacggtgctcaacataggttgcgcgcacggtggtggctttgagtgggccgctctgcagcgcgtaagaggcgcctacaccgtattcctggtgcttctcgccgtcctgggactggatgccgtcgtaggcaaacttggcccggccgttgttgccggtgtagtgggtgccgtcgatgccccagccgcgtgccgagtaggcgttgaacttcaggccaggtacgccgtattcagccatattgatggcataggcgatctggaaggatttctcgttcgggccgttgaagtcagacgtcagggagttggccaggtagataccgttggtttcgtgcaggtagtcgaagtactcgttaccgttcacttgttggtagccgaaggtcaggctgtgtgcctggtgagtcaggcccagggagagggagaaggtatcgttgtcgatttcccccatctcttttttgccttcatcgacagtcttgtagtagttgaagccggtggtcaggcccaactgctgcgcgtcgcccagctcgtgggtggcgccgaagtagtactggttccagaagtccttcacgttagcggcgaagaagctggtcttcaggcttttcagcggctggtagttcacacccagggtcgacactttgtcggtttctgcgccattaccgtattcgctacggaatttcgacaggctctgctcgctacgtggcgaaacgcggtcgaacacgccgccctggaacgacaggttgctgaactcttcgctgttgaagctcacaccctggaagctggaaggcagggcacggttgccgatggtgtcgacgatgccgctgctgaagttctggcgaccggcggtcagtgtggtgttggacacacggaattgcacgttggccaggcccagtttgctccactggtcgacggcgtcgccgttggagtcggccagggtacggttggagccgcctttgatatcacgcttgctgcggtccagcaccagggcgttgtacaccgccacttcagtcttgaccccaacggtgccctgggtgaaacccgagctggcgttgaggatggtgccttgcacccagttggtacggttgcgatcggtcagggtctggccgtgtttctggtacgagaaggtgcccccacggtatttgctttcatgggagtaccagttacgcgtggtgccgcccaggctgaaatcttcgataaagcctttggcctcgctttgggcgctggtgccggccagggtggtaggaacgaagtcctggctttgcgtttcagcgtaggcggtggccgtgatgctgctgatggccaaggccagaagcgctttgctgctcagtttcatgggtgaagctcctttggttctcttttttaatgccggtctttttgggtgatccggctattgggtgtggaactcgttcaagctattgcaaacgtttggcgtaggaaatttcccaacaaaagcctgcacgtttgccggggagccgatttcgctccccgccatccggttattgtcttatgggttgatgctgacgcccgagaacacgttgcggccgaaggggcttaccttgaagccttcgactttggcgcttaacggctggttgaccgtcgagtgggcgataggcgtgatcggcacctgctgcttgagcagttgctgcgcctgtttgtacagaacagtcctttgttcgcggtcggtcacgaccttggcttgcttgatcaacttgtcgtacgccgggtcgcaccacatggagtagttgttcccgccgatggcgtcgcagctgtagagggtgccgagccagttgtccgggtcaccattgtcgccggtccagccgatcaggctgacatcgtgctcaccgttcttggtgcgtttgatgtactcgccccactcatagctgacgatcttgaccttgaggccgatcttggcccagtcgttctgcagcatctcggccatcagcttggcgttggggttgtacgggcgctgtaccggcatggcccacaaggtgatctcggtgccttccttgacgccggcggccttgagcaactccttggctttttccgggttgtaggcggcatccttgatgctgtcgtcgtaagaccactgcgtcggcggcatggcgttgaccgccagttgcccggcgccctggtacacagcattgaggatgctctgcttgttcaccgccatgtccagcgcctggcgtacttccaactgatcgaacggcttgtggcgcacgttgtaggagatatagccgaggttaaagcccggcttggtcagcagttgcaggttcgggtcggccttgagggcttcgacatcggcggggcgtggatgcagggtgacctggcattcgccggccttaagtttttgcacgcgcaccgacgcgtcggtgttgatggcgaagatcaactggtccagcttgacgcggctcgggtcccagtactgtttgttgcccacgtagcgaatctgcgagtctttctggtaacgctggaacacgaacgggccagtgccgatcggcttctggttgatgtcgctgggccggccttgcttgagcaactgctcggcgtattcggccgagagaatcgcggcaaagctcatggcgatgttctgcacgaacgcggcgtcgaccgtgttcagggtcatcaccacggtgtaggggcctgttttctcgaccttggcgatgttcttgttcaggctcatcccgttgaagtacggaaactcggtggggtaggccttacggaacgggtgctcggggtcaagcatgcggttgaaggtgaacagcacgtcgtcggcgttgaagtcccgcgtcggcttgaattccttgttgctgtggaacttcaccccttcacgcaggtggaaggtgtaggtcaggccatctggggaaatatcccacttggttgccagcccagggacgacgtcggtggcgcctttttcgaactccaccaaacggttatacaaaggctccgccgcatcgttgtcggtggcggtggtgtattgcgcagtgtcaaaccctgccgggctgccttcggagcagaacaccaggctcttcttctcggcggcttggcccatcgtggccacggccagcaggctggtggcaaacagagcggatacaacggtggtatggcgcatgacgttccccgtccttgtttgtagttatcaacagcgagccttcctgctggcgtgcagccaggcagacctcactgatcccacacacagcaagtgcccttccccagaatgatgcctctgctgtcctacgaccttatggggcgttgaccttgcagtaaatgcgtcaattctgactgaccttgtaggcaacggaggcacgggtcgcagttcattgctgtaagacggcaacgcttgcaaacgtagtctgtttcctaaggtccaggcggatggaataacggcgacgttatgaaacgtcgccgttattgatccttacttgccgctgacgctaacgccgtagaaggaattcaagccaaacgggctgatcttgaagtcttgtacggtattacgcatgggttgatacaccgtcgagtgcgcgataggtgtcatcgggactgcatctttgaggatatgttgcgcctgcttatacagctcggtgcgtttggcgacatccgatgtggccttggcttctttcacgatgccgtcgaatttcttgtcgcaccacttggagaagttgttgcccgacagcgagtcgcagccgaacagcacgttcagccagttgtccgggtcaccattgtcgccgctccagccaatgatcatggcctggttctcgccgcccttggagcgcttgatgtactcgccccactcgtagctgacgatgttgaccttcaggccgatctgtttccagtcgttctgcagcatctcggccatcaacttggcgttggggttgtaggggcgctgaaccggcatggcccacagggtgatctcggtaccttccttgacgccagcggccttgagcagctctttggctttggcaggatcgtacttggcatccttgatggtggtgtcataggaccactgggtcggcggcatggcgttgactgccaactggccggcaccttggtacacggagtcgatgatctgctgcttgttcaccgacatgtccagggcttcacggacgcgcaggtcggccagcgggttcgcggcggtctggcccttgagtactggcatgacgttataggcgatgtagcccaggttgaaaccggcctggtgcggcagtttcaggtccttgtcctcacccagcgccttgaggtcagccggacgtgggaacagggtgatctggcattcgtttttcttgagcttctggatacgcaccgacgggtcagtggtgatagcgaagatcaggttgtcgatcttcacgtcttcaggtttccagtagtccttgttgccggtgtagcgaatgttcgaatctttctggtagctcttgaacacgaacgggccagtgccgaccggcttctggttgatgtcggcaggcttgccttccttcaacagctgcgcagcgtattcggcggactggatcgaggcgaagctcatggccaggttctggatgaacgcggcgtccacggtgccaagggtgaacttgacggtgtggtcatcgactttttcgatgttcttgatgttggtgtccatccccatgtccgtgaagtacgggaactcggtggggtaggccttacggaatggatcgtctttattgatcatccggttgaaggtgaacagtacgtcgtcggccgagaattcacgagtcggcttgaagtacggggtggtgtggaacttgacgccttcgcgaaggtggaaggtatacgtcaggccatccggggacacgtcccagctggtggccaggccaggaacgacggcggtgccgccacgttcgaactggctcaggcggttgaacatggtttcggccgaggcatcgaagtctgttccggtggtgtactggcctgggtcgaaaccggccgggctcccttcggagcagaacaccaggttagttgccgcaagggctacgggggctgcggccataaggccagcgctcactaataacggaaggactgcgtgtttaagcatgttggcctcatgatttgttgtcatttttggtggtgagggcgacctcgtgagtcggcctgcggatacttatgcaggcgccatacccaatgcaagatgcagagcggttgcaaagggaaaactgtggtacgaacgtacaggaatgtcgcaattatgaaagttctgacacaaaagtgcctatttggagggttttttcggtgcaaatggcgcaccaaaaaagcccagccgaggcgtctagcgcactcggttggggcgctgttgttacttatctagacccacaccgtagaacggcgtgagcccgaacgggctgatcttgaagtcacgcacttgcttgcgcattggctggaaaaccgtcgagttcgcaataggcgttataggtacttgttccttaaggattttctgtgcctgttgataccacttgatgcgctgctcgcggtcgctgctgaccttggcttgctgtaccagcttgtcgtaggcagggttacaccatttggcgtagttgctgcccttgaccgcagcacaactgtagagcacgcccagccagttatccgggtcgccgttgtcgccggtccagccgtaaatcattgcgtcgtgttcgccatttttcgcgcgcttgatgtattcgccccactcatagctgacgatgttggccttgatgccgaccttggcccaatcctgttgaatcatttgtgcggacattcgcgcattcgggttcgaggcgcgttgtacggtcatggcccacagattgatggtggtacctggtgcaacccctgcttcttttagtagcaaccgcgccttggtcgggtcgtagggtgcatcctggattttagggtcataagaccactgggcgggaggcagtgcgttctgcgccaattgtccggcgccctggtaaacggccttgatgatggcgggcttgtcgatggccatgtccagggcttggcgcaccttgagctgatccagcggcggatgagtcacgttgtaggcaaggaagcccaggttgaagcccgcttgttgctgcacgcgcaggttggggtcttgcttcattgcctcgatgtcagcggggcgcgggtaaccgctgacctggcattcgccggccttgagtttctgcaggcgcgctgcggcgtccggggtgatggcgaacaccaggttgtcgagcttcacgtcctcgggtttccaatactgcttattggccgcataacggatctgcgcgtctttctggtagcgcttgaacacaaacggcccggtgcccaccggttgctggttgatctgctcggccttgccttctttcaacagttgggcggcgtattgcgccgattgcaccgaggcgaaactcatggccaggttctgtacgaacgaagcatcgacgttgttcaagttgaaacgcacagtgtgttcgtcgagtttttcaaggcctttgatcgtagtgttcaagcccatgtcggtgaagtagggcgattcggaggggtaggccttgcgaaacgggctctcggcgtccagcagacgattaaaagtgaacagcacgtcatcggcgttgaagtcgcgggtcggggtgaagaagtcggtggtgtggaacttgacgccttcacgcaggtgaaaggtatacgtcagaccatccttcgacacgtcccaactggtggccaggcctggttcgacctcggtgccaccgcgcttgaactgggtcaggcggttgaacacggtttcggcggatgcgtcaaaatcggtgccactggtgtactggctggggtcgaagccggcggggctggcttcggagcagtagaccagggtggtagcggcgtgagccatcggtataaaagctagaaggcttgcggcgaggagcactggcttaatggcgattctttccatggagacccctgaaatggcaggcgtaaaagctgcccaaacgaaaaggcggtaaccgaggttaccgccgttcagctggcttaggtaggggatacttctatccggatgggagccgatttatcgattataacgggcgggccgtctatttcattacttgcacggaggttgaaagttcgagtggctgttatgttcacgtctttggcgagggtggactcacctctaacctcagatttcaggcgccattgggtggttattgtaacctcggtctcattttttaaagggttatagtcgatgacgtactgcctgtcgccaacactgctgatataaccgtctttcactcggggaggctgcaattcaaaccacgcaggagcggaagagccttgatgagcaacctctgaaattgccgctcgcatgtcaggatcgggcacggtgcgctcaaatgcattgatcccatcccctataagaccattacggatctgttgttctaagtcatctgggatagtcattcccgctatctgctggggtatgtcgatttcaacgttctccaggtcagcgcttcttattgtgtaagggtctcggttgatgtctttgataaattgtggagaataattgctggtaccatactcggatggcgaagctgtttccgattcggataccgtgaagtccccgctgtccgttgtccaggaaaagacagggcggttttctaaaacaccgttctcttccttgaagctgacgccatatttatagttcgcttgctcttcaacattgaaatacttgtcgagtatgtcagcgcctttcattttggtaccgtttaactcaataaaattatccgatacctgtgcaggcgtttttagatcgttacttggtgttggggactcagagcgttgccatggccacttcaccccgccattgcccggcgccctggcccattctccatcacgcccaggtgtgatgaccatcagccctgcgccgttatcgggattaatgattttggcgaacacgtcgccggttcgatagcggcctgatatttcaaatactttgctcgcccccgtctcgtcggtaaagcgcacgaactggcgcagtgccccctggctgtcggttattcgatagacacccaacgcatcgcggggcgcgctctttatcaactgctcaccctcagacacggcatagggagccatcggcaagagtgtttgggattttggcaggggagccccagcttcgttaaccgtgggggtgccgctggatgggcctggtgttggctcttcgagttcattgatttgcggttgggcgagcgggtccacaaccggtagctcattctcgggcggcaatgcaaaaggatcttccggaacttcgcttgcccccgctgagaacaacgtgttcagcaaaccatcgagtgccttggaagctccgttgtcgcgttccgcctcggtgtccccggacgttgtttgttccaagcccaaccccaactcggtcagcccggcaagtgccgctgcgccggcaaccggtgcagcgataggcgcaagcttggccaatagcccggcggctacggtaatgtcgttcaaccacgtatctcgggttacttcgctgttggatttgacgacgacgtcggtgtcactcgtcatgcgctgtttggcggcggttgtcagggtggaaaacacatccccctcgattttcgagtgactactggtgttcaccgggtttttcagctcaccggcggccattttcttgaagagggcgtccaggccatcttgcttgtcgccaatacccgtaaagctcgcgcccggtacaaacccgattgccagttgtatgagaaggtcaggcttacggttctgacgatcagccaatgaaaagtgcgcgagcagcgactggctttttttcgggtccttcgtctggtcaattacccattgattgagcttgtccaaggagtcgaagcgcagaaatgccggtttggctccaggtatgtaaagcacttgccggccagtgtcgtcgctactgaatcgaagaatgtcactggatgtgaaaccgtggatatcaagggcatgcacttggggagcgctgcttactggcgctttggccttgagctgttcaaggctcaggggtgtgttttcgtcgagtggaatattgttcgccgtcgccattaccaggctgtagtcgccacgagtgaactggtgttctgaggcttgcaaggctcgttcagcaggtgaacaggcttgggctttcttcagttgctcccgtgcctgggaaacgaactcacctttgattaccgtgtggtagttatcggtgtgcgcgttccagaacctgtcgaatttctgggtcatctgggtttgaaagtcggttttccagctctcgtgcatcacttgtgacggcttgaggtcgatttgattgtgcttgccgtaaccgcctttatcgctttgccctgcgggctgggtatacaaacctgcctcgaggtcgaggttgccaggcacccagtcgtgctcggagaagttcttcagcaaggcgtcgggtaagcgcagtgaggaccagggctcctgaaaagtgtgttcccagccggtagccgtgtccgcgctttcaccgcctttgaagcggttcaaatagacagtatcggagtcgataggtttgcccgtgagtttgagcagcaggtcatccgcccatttcttggcttctgcccgcgtattgggcaggttgttggcgacgtcaaccgccaggcgcttgtaagccaacgcctgtggtgcggtgctgtagtacttggcggcgttgtgttgttgctcttgcagcgcctgtgccgagcggctgctgtcagggcgcaggcggtcatcggcggggatagggtcgaaggtgtctttatgttccagatgccttatttgtgctcgagcctgggacagcgtttggggaaggggcacgccttcaaagttggccaccacttttgcgctgacctgtatggagtccttacccaacctcacacgcaaatcaccgttattgccaggggcgataacttttgcggcgtccagcagggggcctgaaatttgtccccagcctgatgtatccgacagatggaaggttttcgttttgccctcgacctcggcggacaaggtacctgtagaggggttgattgaaagcaaggtgtccggggcgaagtgttgttcgcgcagccagccctgtacgacggcattttccaagtgcgtgcgatacagcccaagccattggcccagggtgctttggggcggtacggttataagcccggcattgccgtgcaacaccttgcgttgtgcggcctcgaggtaggccttgagcagggctgtttcgtcagggtggacggtttttgcagtgggcggtggcggtgtcacctgcgcttgaatgttcgatatcggatgggggacggcggacggcagcgatggcgaggatgtcggattgagtgaaagggacataagttcggctctcattgtatgaatagatgccagcacagccctccctggtagctatggcagtaatgagtcgtgaaagccgggcgcttgattcctgttaaatatgctgccgtatatgacggcgcgccagcgcgcaaaaaaaggcgcaggccccgtggggctgcgcctgtgtcttgtctaaaaaagttactataaaacttcgatcacgtcgtcgttgcatggagaaatacagtcgccggtcacctctactcataaatgaattttcaaggtttagggtggaatgtctcaggcttataggtgaaggcccaccacttgagtgggttccaataggggttggtcttcgacggtatgaaacgtgaatttaccttcatttcatcggcgatatactgctcagcctggcctctcacgtaggccgttacagcgggagtaagggtgacgcccttcttttgcacgtgttggagataagctttttctactttgtcaatggccgccgttataacttccggcgaaaggctcgcggtgagagtgccggtatacccttttacagggcgccttatcagcctttgaaattgagcggcaaaggaagcgtctcccccagttgcagaattgcatgacaacaggcgtatgttgtcaaaaagctccgggcgtacaccttttgcgtgaagagtctgaagcaactctgccggggtgtggagttgtccatcgaacacaactcttgctacgccagtttcagggttgaaactgccatggacgagtacattcaatcgtgtttccgtgccttttttatttttgtcggtaaaggtatacagcttttcgttgaccacattcaggtcattgacctctccactcaggatgacggctttttcacccgtagaaaaaagtgcctcacccgtgggtatgttttctacggaactcagtggtggaagtttcccgtttgtgccttcgacgggcgggcgggcgcctccactattagccggcaccgaacgatttgattcgtctgtttcgacgtttgtgggaatatgactgtcgttcgaagcttttggtgcgcgcacaaattcaaaatcctgtgtctcggaattgtacctccaactgtagttcttgctgctagacgggggggaaggcaactcaagttcacccaggcccgcttctaccccattgggtgcaagttcgtgcaccagttgcaggctcgatatcaccgctgcggcagtgccgccaacgcgatcgtcggcggtcatgccgtgaatggagtcatgcacaccgaagacaatattgcccgcgttaccaaggacgggcacgtaaccgaaggtgcgtccccataattccttcgcgttcttccacgcttgctgctcggaaccaaacacctgcgtttggtcggcccatactgcgttcttggcgttcacagcttggtactcgttagcaatgccggactcaaggtttccccatttcaagaagtattcgctatttcgtgattgggtataattgaaagtctccctcacaggcacagccttgtcttttatccagttttgataaccggggtatgtagccctgttggagtcgatcaggttttcgagcacatttgcggccgatggccaatgagagtctttgccgccctgcctgtcactggcattaaaactactgtacagctcattacgatttttctcagcccagtgggcaaaatcgtcatcgccgtatatttcactgaccgtgccgtttttcaagtcaatgagcaaacctttattaggccggtggtcgtaatcgccgtgatagttggtgaacgggataaatgcatgccctgccagtgggtagccatatatgtttgggatgaccacgttgccgtttctgtaaagtgtacgatggattgcgtcttgcccttcgggggagagttgttcatagctgttcttgtcgttacgcaggctttctagaattccgcgcacagcataggcatccgcttttccggagcgtttcgccaaggcaccgtacatgtcgcgcataggctcggctacatccaccttccagtgagcctgtagacgcgcacccagcgcttccagatcgttgatcttgttcgcgtcttgtggcttgactttcgtctcttgaaaattgagtaaaccgccttccggtgttctgtcgtgcttaagggcaccggctgcaatttcccatgcatagtaagtgcgttcttcggtgttggtctgcacctctttcttccatttacctacgtaggagttgaacgtcacggtgaatttttcatgtgggtcgtacccggcagccagtaacccgccactgaagtaacccgcaggctctagaaaatggcgaacgttctggaatttgacgttgttttcgccttccttaccctgttccaaggtcttgatgtgtgccactacacgtccggcataggcttctatgcgctgcacctgttccttgggcggatagctcgtaggcgcagaaacggtgtctcccccataaatgacgcctttggagaaatcaagctcatggtcctgcggtggcgcggtcgtattttttactggcggcgagggagcaactgtccgagttggattaaagtctgcaatgggtggtccgccggggctcagcggggcgtgccattgcggtgtggtgttcgctttgtttgctgggggcgctgtttgagttgggttaaagtctgcaatcggtggtccgctgggaataagcgggggatgcccgaaagaagaaagtgtcttcatgaatgactcactttattaatgatttaaagttattttcttgaagtgttatggcattggcgtggagttagtggccagctaacgttactggctcttctattccgtaaggcttccctcagtttgtagggcagtgcctgtatagttttacaagtattaggtggcggcaggtgtgcgaaaagttccagatcgcacgcgccctgtatgtcaaatgttttctaagatgcaacctgtagcgatcaaaaaaaccagaagtatcgcttcggttaagacggtacatgtagcgtaggtgtgacctctacacggataggcgcggagagttatagttctggatgcttttatatttatatccgggatcgcttcgatctcgggaacatcgttgatgttgtcagtgtttttgatccgttggatgagtttgagcccggtttttgatacgacggtcgtggcggtgctcgggggggagcgcctaggttggtggcatcgtcaaatcgggtaccgacagccatccaaaaaaaaggcgcaagcccgtagggctgcgcctttgtcctgtctaaaaacttactgtaaaacttcgatcacgccgtcggcactcatagtgacctggctggtgccagcttccacttcaggcgtcggcgctgaatcggccatggcggctttcatcatcatgccgccactgcgggcgtaaggcattgggtagccattggtgttgaagttcaggttgacgatcttgtagcccttgccgccgagtgcatcggtagccagttgcgcgcgcgccttgaacgccgccaccgcatctttgagcagtgcatcttcgctggccttgcgcgtggtgtcggcgatggcgaagtccatgctgtccattttcaaggtgttcaacaactcgccggtgagtttggacagcgccgggaaatccgcgctttccaggcgcagctcggcgcgttcacgccagccggtgatcttctggttcttgctgtcgtagatcgggtagctgttgcggctgccctggcgcaaggtcacgcctttgacttcgcgcgcctggcccagggcctggttcagggtggtggtgatttcggcagcaagcttggccgggtcggcgttttgcgattcggtgtaaagagtgacgatcatcttgtcgcgggccacttcctggctggcttcggcgcgcagggagatctggttgtaatgcaatgcatcggcggccatggccggcaggctcgccagagcgctggcgctgaaggtaatgatggctgcactgcgaatgaaacgagacatggaagctccttgagatagtcgtgttcggtaagactgtagacgctggcatcgggttcttcgggtttacacattacccacaagttatgcgggcgccgacgaacggtcatttacccggcctgcgtcaaagagccacacacgccgtgccagcaggtctgcttcgtttatactcgtgccgatccgcctgcagcgctcatcgggagagctcatgctcgccgccgtaaaactgacttccgccactcgccagaacctctggcgcctgacgttcattcgcaccctggtactggccgcgcaggccggttccgtcgggcttgcctattggttcgacctgttgccgctgccctggctgcaactggccgtgaccctgggtttttccaccgtattgtgtgtgttcaccgccattcggttgcgtaccacttggcctgtgaccgagctggagtacgccctgcaactggcctgtgacctgtttatccacagcgtgttgctgtacttctcgggcggttccaccaacccctttgtctcctactacctggtgcctttgaccatcgccgccgtgaccctgccgtggcgctattcggtggtcctgtcgggcatcgcgctgacgctgtacaccttgctgttggcacagttttaccccttgcagacattccccatcgcccgggaaaacctgcaaatctatgggatgtggttgagcttcgccctgtcggcggcagtcattaccttcttcgccgcgcgcatggccgaagaactgcgtcgtcaggaagaactgcgtgccattcgccgtgaagagggcctgcgtgaccagcagttgctggccgtggccacccaggccgctggcgccgcccatgagttgggcacgccgctggcgaccatgagcgtgctgctcaaggaaatgacccaggaccatcacgacccggccctgcaggatgatttgagcgtgctgcaggaacaggtcaagcagtgcaagctgacgctccagcaactggtgcgcgccgccgaggccaatcgccgtctggcggtcgaaatgcaagacgtcacccaatggctcgatgaggcgctgaaccgctggcacctgatgcgtcccgaagccagttaccgcttcaacctgctgggccaaggcagcgtaccgcgcatggcgccaccgccagacctgacccaggcgctgctcaacttgctgaacaatgccgccgatgcctgccctgaaggcctcggcgtgcagttggactgggacgcggaaaacgtcaccatcagcattcgtgaccacggcgccggcgtgccgttggccattgccgagcagatcggcaaacccttctttaccaccaagggcaaaggcttcggcctgggcctgtttttgagcaaggccagcgtgacccgcgcgggcggctcagtgaagctctatagtcatgaggaaggtggcacgctcaccgagctgcgcctgccccgtgtcgcacgaggagatatcgatgagtgacgagatccaagtcgaaggcgaagaactgccgcacctgctgctggtagatgacgacgcgacctttacccgcgtgatggcgcgcgccatgagccggcgcggttttcgcgtcagcaccgcaggttctgctgaagagggcctgaccatcgcccaggccgacctgccggactacgctgccctggacctgaaaatggacggcgactcgggcctggtgctgctgcccaagctgctggaactcgacccggaaatgcgcgtggtgatcctcaccggttactccagcatcgccaccgccgtcgaggcgatcaagcgcggcgcctgcaactacctgtgcaaaccagcggatgccgacgacgtgctggccgccttgctgtccgagcatgccgacctcgacaccctggtgccggaaaatccgatgtcggtggaccgcctgcagtgggaacacatccagcgcgtgttgaccgaacacgaaggcaacatctccgccaccgcccgcgccctgggcatgcaccgccgcacgctgcaacgcaagttgcagaagcgcccggtacgacgctgaacggcaactgaacaacccgcttcaggctgcacggacgcacgaaccgatcccctatgatcggttcaaacgcctgtgactttttcctaccgagcctgaacgatgaatcagaacgctgaataccgcgcggtcaacgatgcggtgcgtgggcaattcttccgccgaacctgggcgatgatcaccccctattggcgcagtgaagagaagggcagggcctggctgctgctggccgccgtgattggcctgtcgctgttcagcgtggcgatctccgtgtggatcaaccactggtacaaagacttctacaacgccttggagaagaaggacacagcggccttctggcaactgatcggctatttcggcgggatcgcggcggtggcgatactcggtgcggtgtaccgcctttacctgacccagatgctgacgatccgctggcgcgcctggctcaccgaaaaacacttcagccgctggctggcccacaagaattactaccagctggagcagggcggctacaccgataacccggaccagcggatttccgaagaccttaacaacttcacgtccggcactttaagcctgggcctcggcttgctgcgtaacgtggtcagcctggtgtcattctcgatcatcctgtggggcgtctcgggcagcatcgaagtgttcggcatcaccatccccggctacatgttctggtgtgcgctgctgtacgccgccgtgggcagttggctgacgcacctgatcggccggcgcttgattggcctgagcaaccaacaacaacgcttcgaagcggacctgcgtttttccatggtgcgggtgcgtgagaatgccgaaagtatcgccctgtacaacggcgagccgaatgaaaggcagcgcctgagcacgcgcttcggcaaggtctggcagaacttctgggacatcatgaaagtgtccaagcgcctgacctttttcaccgccggctacagccagatcgcgatcatcttcccgtttatcgtcgccgcgccgcgctacttcaccggcaagatcgagctgggcgagctgatgcaaatcaactcggcgttcggcaacgtacaagagaacttcagctggtttatcaacgcctattcggagctggcgacatggcgcgccaccagcgaccgtctattgagtttccagcaagccatgagcgacaacgagcaacgcacgccggcgatcgacgtgcgccctgaaggcgagcgcctggtgatcaacgacctgggcatggacctggccgacggccgccatttgctcaccgacgccgacatgaccgtggagcctggccagcgcgtcatgctcagcgggcgttccggcagcggcaagagcaccttgctgcgggcgatggggcacctgtggcccgccgggcatggcagcattcgcctgccggcgacgcgctacctgttcctgccgcaaaagccttacctgccgattggtacgctcaaggccgtgttgagttacccacaggacgacagcgtctacgcgccagaacgttatgcacaggtgctggaaacctgccgcctgccccatctggtcagccgcctggatgaagccaaccactggcaacgcatgctctcgcccggcgaacaacagcgcctggcctttgcccgtgcgttgttgtttgcaccgcgatggctgtacatggatgaggcgacctcggccatggatgaagaagacgaggcgaccttgtaccaggcgttgatcgatgaactgccggggctgagcatcgtcagcgtcggccaccgcagcagcctcaagcgtttccatgggcggcatgtgcgcattgacggtgggcggttgcaggaacagcaactcacttaagctcttgcgcgcttaatgtaggagtgtctgaggcaggtgtgtcaacgggcacaccgctatcgcaggcaagccagctcccacaggggggcggtgttgtctgatggttcaggcacctaataaaaagcccggctgatcatcgatcagccgggcttttttattgctcgaagatgacttacttcttcaagccgtaatgctcatccaacatgcctggggcgttcggtgtttttggcgcgtagtcccgtggtggctcctggttttcccgtggtggtgtcaggcgttcccgtggggtttgcggtgcatcggaatgcagcgcggccagcaggcgctggcgggtgatgtcgtcgagggccaggcggttagcgccatcggcgaggtgatcctgtacttcctggtagctctgggtgagcttcttgaccagggtcgcggtgctgttgaagtgggtaacaacctcgttctgataactgtcaaaacgttcctgaatgtcatccagctgacgctgcgtgcggttaggcgcggcattgggcagcaggcgggcaaccaggaaaccaatggcgacaccggcaaccagggcaagagtcggcaacaaccaaactaagagcgagtgttccacgagtccttcctctataaacggctttgctttacgttaacggctcaaacctgcgctgtataccgcgattaagctcgcaatgatgccatgcacagacttttagctagacgagtcgaccccttgagaggtcacggagttcatccttgctcatgcgtgaaacccccgttttgatcgatggcccggtgggccaattggaagccctgtacctggatcaccccgaaccacgtggcctggcgctggtttgccaccctaacccggtgcagggtgggaccatgctcaataaagtcgtctcgaccctgcaacgcactgcccgcgatgcgggtttgattactttgcgtttcaattaccggggcgtgggtgccagtgccggtactcacgatatggccaccggtgaggtcgacgatgctgaagcggccgccacctggttgcgggaaaagcacccggacctgccgatcaccttgctgggtttttccttcggcggttacgtggctgccagtctcggcgggcgtttggaagccaagggcgagaagctcgcgcacttgttcatggtggctgcggcggtgatgcgcctgggcgagtcggacgtgctgccccaaggctgcccgttgaccctgatccagccggaaaccgatgaagttgtggacccgcaactcgtctacgcctggtccgccgccctgaaacgcccccatgagctgctgaaagtggcagaatgcggacacttttttcatggcaagctgaccgatctcaaggatctggtgctgccacgcctttcgaattgatgacaagcgatcacccatgacgacccgtacccgtatcctcaccggcatcaccaccaccggcacgccgcacctgggcaactacgccggtgcgattcgcccggcgatcctcgccagcgaagacgcgaatgccgactccttctacttcctggccgactaccacgccctgatcaaatgcgatgacccgcagcgcatccagcgctcgcgtatggaaatcgccgcgacttggctggccggtggcctggatgtgaaccgagtgaccttctaccgccagtcggacatcccggaaatccccgagctgacctggctgctgacctgcgttgccgccaagggcctgctcaaccgcgcccatgcctacaaggcctcggtggacaagaacgtggaaaacggtgaagacccggatgcgggtatcagcatgggcctgtacagctacccggtgctgatggcagcggacatcctgatgttcaacgcgcacaaggtgccggtggggcgcgaccagatccagcacgtggaaatggcccgcgatatcggccagcgcttcaaccacctgttcggcaacggtaaagaattcttcaccatgcccgaggcgctgatcgaagaaagcgtggctaccttgccgggcctggatggccgcaagatgtccaagagctacgacaacaccatcccgttgttcaccagcgccaaggacatgaaggacgcgatctcgcggatcgtcaccgactcgcgcgcgccaggcgaagccaaggacccggacaattcgcacctgttcaccctgtaccaggcgttcgcgaccaaggcccaggaagcccaattccgtggcgagctgctagaaggcctgggctggggcgaggcgaagaaccgtctgttccaactgctcgacggccagctcggcgaagcgcgcgagcgttaccatcaattgatgtcgcgcccatcggacatggaagaccagctgcaggtcggcgccaagaaggcccgcgctgtggcggcaccgttcctggccgagctgcgtgaagcggtgggcctgcgttcgttcgtcaaccaggcggcggcgccggtcgccaccaagaaaaaagcagcgaaggctgcgcggtttgtgagcttccgtgaagctgacggcagcttccgcttccgcctgttggccgccgacggcgagcaactgctgttgtcgcgcaactttaccgatggcaaagcagccggcgcggtgaccaagcaactgcaaagtggtgatgcgctggacgtgcgcgccgaggctctgaccttcagcgtatggctggacggcgccgcagtagctgacagtgccgagtacgccgatgaagcatcgcgtgacgcggccatcgaagccttgcgcgctgcgttagcccccatcgaggattaacccgaccaagggttgattgccattatccagggccgtcgttacagtgtcggcccgtttttgttgccttgctaacgaaattatgacgcccctagaacgatatcaagctgatctgaaacgccccgagttcttccatgacgcggcccaggaaaatgccgtgcgtcatttgcagcgcctgtacgaggacctcgtagccgcgtcgcaaagcaagccagggatgttcagcaagctgtttggcaagaaagaccacacgccggtcaagggcctgtatttctggggtggcgtgggccgtggcaagacttatttggtagacaccttctttgaagcgctgccgttcaaggaaaaggtacgtacgcacttccaccgcttcatgaagcgcgtgcatgaagagatgaagaccctgccgggcgagaaaaacccgctgaccatcatcgccaagcgtttttcccaagaggcacgggtgatctgcttcgatgaattcttcgtctccgacatcaccgacgccatgatcctcggcacgctgatggaagagctgttcaagaacggcgtgaccctggtggccacgtcgaacatcgtgcccgatggcctgtacaaggacggcctgcagcgtgcgcgcttcctgccggccattgcgctgatcaagcagaacaccgatatcgtcaatgtcgacagcggcgtcgactaccgcttgcgtcacctggagcaagccgagctgttccacttcccgctcaacgaagccgcacacgaaagcttgaagaaaagcttccgcgccctgacgccggaatgcacccaggcggtggaaaacgacaagctgatgatcgagaaccgcgaaatcatcgcactgcgcacctgcgatgacgtagcctggttcgagttccgccaactgtgcgatgggccacgcagccagaacgattacatcgagctgggcaagatcttccacgccgtgatcttgagtggtgtggaacagatgggcgtgaccaccgacgatatcgcccgacggttcatcaacatggtcgatgagttctatgaccgtaacgtcaagctgatcatctcggcggaagtcgaactcaaggacctctatacgggtggtcgcttgaacttcgaattccagcgcaccttgagtcgcctgctggaaatgcagtcccacgagttcctgtcgcgcgggcacaagccttaatcaatctccggctcaatggagatctaatgtgggagccgggcttgcccgcgatgggggggtatcagtcaactataggctggctgatacaccgtcatcgcaggcaagccagctcccacaatggtttgtgttggcctggagtcaggcggcctgctgaaattgctggcgatactggttgggcgacaactccgtgtgctgcctgaacaaccgcgcaaagaaactcgcatcgtcgtaacccacctcataactgatggtcttgatgctcttgcggctgcccgagagcaggcccttggcggtctcgatgcgcaggcgttgcaggtaatgcagcggcttgtcaccggtggcggtctggaagcggcgcatgaagttgcggatgctcatgccgtgttcccgggcgacgtcttcaaagcggaatttgtcggcaaagtgctcttcaagccaatgctggatctgcaggatgatcacatcctgatgcagcttctgcccgccaaacccgatacgccccggtgaatagttgcgctgcacttcatagagaatgtcgcgggccacggcctgggcgatgttggcgccacagaagcgttcgatcaggtagatataaaggtcgcaggccgaggtggtgccgccggcgcaatacaggttgtcggcgtctgtgaggtgcttgtcctgattgagctgcaccttggggaagcgctcgctgaaagcgttgaaaaaacgccagtaggtggtcgcctccttgccatcgagcagcccggcttcggccagccagaacaccccggtggcctcgccgcacagcacagccccgcgagcatgttgttcgcgcagccacggcagcacctgggggtagcgggtgcacaacacatcgaagtcgtcccagaaggccggcagcacgatgatgtcggcgtcttcgaggccgccgtccaccggcatgatcacatcgctgaagctgcgcacggactggccgtcggggctgaccaggcgcgtttcgaaccctggggtcaggcccaggccttgctgtttgccatggcgcaggctggcgagatggaagaaatccttggcttgcatgagggtggaagcgaatacccgatcaatggccaaaatgctgactcgccgcaacggcgtggagatttggttagacataatttcatttattcttataggggaaagtggtcaccagacggctggatcgtcttattttttgtcgcatgtgtccagtgtcccgtgacgccttcggggcataggctctgtgggctcgtccttgtccgacaatccacacaggtgacccatgatccccagaaccttgttcagctcggagcacgaactcttccgtgagagcgtgcgcaccttcctcgaaaaacacgccgtgcccttccatgggcaatgggaaaagcagggctatatcgaccgtaacctgtggaaccaggcgggggaggcgggcatgttgtgttcccacctgccagaggaatacggcggcctgggcgcggattttctctacagcgcggtggtgatcgaagaggtcagccgcctgggtttgaccggcatcggcttttccctgcattcggatatcgtcgcgccgtacatcctgcattacggcagtgaagcgctgaagcacaagtacctgccccagttgatctccggggagatggtcactgccatcgccatgaccgagccgggcgccggttccgacctgcaaggggtcaagaccagcgccgtgctggacggcgatgagtacgtgatcaacggctccaagacctttatcaccaacggctacctggccgatctggtgatcgtcgtcgccaagaccgaccccaaggccggcgccaagggcaccagcctgttcctggtggaagccgatacgccgggcttcgacaagggcaagcgcctggagaaagtcggcatgaaggcccaggacacctcggagctgttcttccaggacgtgcgcgtgcccaaggaaaacctgctgggccaggcgggcatgggctttgcctacctgatgcaagagttgccgcaagaacgcctgaccgtggcgattggcgcgctgtcctcagccgaagcggctttgcagtggacccttgagtacacccgtgagcgcaaggcgttcggcaaggcgattgccgatttccagaacactcggttcaagctggcggagatggccaccgagattcagattggccgtgtttttgtggacaagtgcatggctatgcacctggaaggcaagctggacgtgcctaccgcagcgatggccaagtactgggccacagacctgcaatgcaaggtgctcgatgagtgcgtgcagttgcatggcggttacgggttcatgtgggaatacccgattgcccgggcctgggcggatgcgcgggtgcagcgcatttatgcggggaccaatgagatcatgaaggagatcattgcgcgggcgctttgatgtttggtgatggatcgttcccacgctccgcgtgggaacgcctcatgtgacgctccgcgtcacgactctgagagcggacgcagagcgtccaaggcggcattcccacgcagagcgtgggaatgatcagtgcgggtcaatcagggtgccggattcggatgatccttctgaatcgcctcaatcccttccaacacctctttcgacaatttcagatcggcactggcgatgttgctgtccagttgttccagtgaagtagccccaataatattgctggtcacaaacggctgttgcgtcacaaacgccagcgccatctgcgccgggtccaggccatgttcccgcgcaagagccacatagcggctgcacgccgcttccgactgcgggttgaagtaacggctgaagcggctgtattcagtcaggcgcgccttggccgggcgtgcgccattttcgtacttgccactgagcatgccgaacgccaaaggcgaataggccagcaagccgcactgttcacgaatggcaacctccgccaggcccacttcaaagctgcggttgagcaggttgtaggggttctggatcgacacggcgcgcggccagccgcgggcttcggccagggccaggaacttcatggcgccccacggcgtttcgttggacaggccaatgtggcggatcttgccggccttcacctgttcgtccagggcttcgagcgtttcctccagtggggtgaggtcgtcttcgtccttgtgcttgtagctcaactggccgaagaagttggtgctgcgctccggccagtgcaattggtagaggtcgatccagtcggtctgcaggcgcttgaggctggcgtcgagggctgcgccgatgtgctggcggttgtggcgcaggtggccatcgcggatatagtcgatggtgttgccggggccggcgatcttgctggcaagcacccagtcggcgcggtcgccacggcttttgaagtagttgccgatgtagcgttcggtggtggcgtaggtgtcggccttgggcggcaccgggtacatttccgcggtgtcgaggaagttgatgcctgcggccttggcccgttcgatctgcgcgaaggcctctgcctcgctgttctgctcgccccaggtcatggtgcccaacgcgatcgcgctgacattcagatcggtgcggcccagctgtcggtaatccatcgggtactccttcaggggaaaacaatcataaaagcaggttgaattttttttcgcaatctgcataattgcccacctctttctgcagtggaagtgatgcgccgcctgccgaagaatcttgccgttgaacggacgcgccgacccgagcccccgatagcgtctgtatccggctgcctttgaccttgtcaaagtacgcactattcagtaagatccgccgtctaaatttacaggcggcccctgaggctattaaagaatgacaacttttactgcaaaaccggaaacagttcagcgcgactggtttgtcgtcgacgccgctggtcagaccctgggtcgtctggccactgaagtcgccagccgtctgcgtggcaagcacaagcctgaatacaccccgcacgttgataccggcgactacatcgtcatcatcaacgctgagcaggttcgtgtaaccggcaacaaagcaagcgacaaaatgtactaccgtcactccggtttcccaggcggtatcaagtcttccaacttcgaaggcctgattgccaagaagcctgaagccccgatcgaaatcgcggtcaaaggcatgctgcctaagggcccactgggtcgcgatatgtttcgcaagctgaaagtctatgcgggcgctgtacaccctcatgctgctcagcagccccaagaactgaagttttaacggaatagttcattatgtcggcgactcaaaattacggcactggccgtcgcaaaaccgcaaccgcacgcgttttcctgcgtccgggcactggtaacatctcgatcaacaaccgttccctggacaacttcttcggtcgcgaaactgcccgcatggtagttcgtcagccgctggaattgaccgagaccgttgaaaagttcgacatctacgtcaccgttatcggtggcggtgtaagtggtcaagctggcgcaatccgccacggtatcactcgcgctctgatgcagtacgacgaaaccctgcgtggcgctctgcgcaaagctggcttcgtgactcgcgatgctcgtgaagttgaacgtaagaaagtcggtctgcgtaaagcgcgtaagcgtccgcagtactcgaagcgttaattcgctttacgttccacaagaacgcccagtctcctcacggagctgggcgttttttattgcctgcgatttatgcacatttttcgccgtgacaacttgccacatccgtagaccccctatactacaaggcctggaggcggagccccgggcaattcccttgtcatacgtggggcttttcattaccatccgtcaaaatttttataagtaaagattcaacacttagtagacgcctgatttaacaggccaaaaagctgatgggagaggactgaatgagcaatgacggcgtgaatgcaggccggcgtcgcttcttggtagcagccacatccgtggtgggtgctgcaggagcggtgggggctgcggtcccgttcgtggggtcatggtttcccagtgccaaggcgaaagccgcaggtgcaccggtgaaggtgaatgtcagcaagatcgagccaggccagcagatgattgctgaatggcgcggccagccggttttcattgttcgtcgtaccgaggaaatcctggggaatctgaagaagatcgaaggccagttatctgacccgacatcggaaaagtccgaccagcccgcctacgccaagaacgaagcgcgttcgatcaagccagagattctgctgctggttggtctgtgtacccacctgggttgctcacctaccttccgcccggaagtggcgcctgtcgacttgggcaaagactgggtcggcggttatttctgcccgtgccacggttcccactatgacctcgctggccgcgtctacaaatcccagcccgcgcccctgaacctgccggttcctcctcacaattacgaatctgacgacatcattgtcattggcctcgacaaggagaacgcgtgatgagcaagttcatggattgggtggatgcgcgcttccccgccactaaaatgtgggaagaccatctcagcaaatattacgcgccgaaaaacttcaacttcttctacttcttcggctccctggccctgttggtgctggtcaaccagatcgtcactggcgtgtggttgacgatgagctacacgccgtcggcggaagaagcgtttgcttctgtcgaatacatcatgcgtgacgtcgagtacggctcgatcctgcgcctgctgcactccaccggcgcgtcggcgttctttatcgtcgtctacctgcacatgttccgcggcctgctctacggctcgtaccagaagcctcgtgagctggtgtgggtcttcggcatgttgatctacctggcgctgatggccgaagccttcatgggctacctgctgccctggggccagatgtcgtactggggcgcccaggtgatcatctcgctgttcggcgcaatcccggtgatcggcaacgacctgacccagtggattcgtggtgactacctgatctccggcatcaccctgaaccgcttcttcgccttgcatgtggtggccttgccgatcgtgatcctgggcctggtggtactgcacatcctggcgctgcacgaagtgggttccaacaacccggatggcgtggacatcaagaagcacaaggacgagaacggcatcccgctggatggcattccgttccacccgtactacaccgtgaaagacattgtcggcgtagtcgtgttcctgtttgtgttctgctcgatcgtgttctttttcccggagatgggtggttatttcctggagaagcctaacttcgaacaggccaatgccttcaagacacccgagcacattgccccggtctggtacttcacgccgttctacgcgatcttgcgcgcgatccccgacaaactcatgggcgtgatcgccatgggcgcggccatcgcggtgctgttcgtgctgccgtggctcgaccgtagcccggtcaagtcgatgcgctacaaaggctggctgagcaagatctggctgtgggtgttctgcatttcgttcgtgatcctgggcgtgctgggcgtattggcgcctacccctgagcgcacgttgctgtcgcaggtctgcaccttcctgtacttcgcctactttattctgatgccgttctatacccggctcgagaagaccaaaccggttccggaaagggtgactggctgatgaaaaaattactcgttgcattcgtgcttgcggcactgccgctactgtccttcgccgccgaacatggcgcagagctggaaaaagtcgatatcgatgtgtctgacaaagccgccatgcaggatgggctgcgtacattcaccaactactgcatggggtgccacagcgccaagttccaacggtatgagcgcgttgccgatgacttgggcattccccatgaagtgatgctcagccacgcggtgttcacgggtgccaagatcggcgaccacatgaacatcggcatgcagccggccgaagccaagacctggttcggcgccgcaccgcccgacctcaccctggtggcccgtgtacgcggtaccgactggctctacggttatctcaaatccttctacgaagaccctgcgcgcccctatggcgtgaacaacaaagtcttcccgaacgtcggcatgccgaacgttctggtcggcctgcaggggcgccaggtggtaggatgcaagcaggttcaggtcgttgaagacggcaagaagcaatatgatccgttgaccggcacgccgctgacccatgaagcgtgcgatcaactgaccatcgtgcccaagaccggtacgctgaacgaagagcagttcgacgagaaggtcaagaacctggtgaccttcctggcctactcggccaacccggtcaaactgcagcatcagcgtatcggtacctacgtcttgctgtacctggctttcttcttcgtattcgcttatttgctcaagcgtgaatactggaaggatgtgcattgatccaaccgtaagcaattgctgttaatcttgcgcgcccagcggcatctctgaacacgtagcgccggtttgaaccggtcgttacagggatgcttctgggcgcgctcgtttttgagctttcgataatttcaacaagcgaggaggaccgccatgggcgtgaccaatcggttggcctgttactccgaccccgccgaccactattcccaccgagtacgcatcgtgctcgcagagaagggtgtcagcgccgagatcatcagtgtggaggcgggccgtcagccgccgaagctgatcgaagtgaacccttacggcagcttgcccaccctggtcgatcgtgacctggcgttgtgggagtcgaccgtggtgatggaatacctggatgagcgttaccctcatccgcctttgctgccggtgtacccggtggcgcgtgccaacagccgcctgctgatccatcggatccagcgtgactggtgcgggttggtggatgtgatcctggattcgcgttccaaagaagccgctcgtgtgcaggcgcgcaaggaattgcgcgagagcctgaccggcgtttcgccgttgttcgccgataaaccttttttcctcagtgaggaacaaagcttggtggattgctgcctattacccatactctggcgcttgccgattctgggcattgaactgccacggccggccaagccgttgcttgattacatggagcgccagtttgcgcgtgaggctttccaggcgagtctgtctggcgccgaacgcgatatgcgctaaggcttaaggagccgttgatgaactccagtcgaccttacctggtccgcgcgctctatgagtggattgtggacaacgattgcaccccgcacatgctggtcaattccgaatttcctgcggttcaggtaccccagggttttgccagtgacgggcaaattgtgctgaacgtatcgcccagtgccgtgcgccacctgcacatggacaacgaagcggtgagcttcgaagggcgtttcggcggtgtgccccatacgctgttcgtgcccatcggtgccatcctcgggatctacgcccgggaaaatggccagggcatggtgttcgatctggagtcgcctttagaggatgacgaaacgattgaaggcgaagacggtgatgatgtaccgccaccggatgccgagccgccgcgccctagcggtcggccaagcttgaaagtggtgaagtaggcggatttcgcttacagacccatctgaaaaatgcctcgacagctgtcggggcattttttttgcgtgaaggatatggatgaaagtcgcgccagaacggtgatcgtacaaccaccatgggctatgatgcggtcttcagttcgtcgagaaagatggttcatcatggaaaacgccagcgccgccccacgtcttccccgcaagcgccgcagccttgcccaggaattggtcacggtgttgtccgagcagatccgcgatggccagctcaaacgcggcgacaagttgcccaccgagtcggcgatcatggatgcccacggcgtcagtcggacggtggtgcgtgaagccatctcgcgcctgcaagcggcggggcaggtcgagactcgccacggtatcggcaccttcgtgctggacacgccaagccccagcggttttcgcatagaccctgccaccgtggtgaccttgcgtgatgtgctggcgattctggagttgcgtatcagcctggaagtggagtctgcgggccttgctgccttgcgccgcagcgatgagcaactggcggccatgcgcgcggccctcgatgccttgaatgaaagtgcggcccacgctggcgatgcggtggcgtcggattttgcctttcatctggaaattgcactgtctaccggtaaccgctacttcaccgacatcatgacccacctgggcaccagcatcattccgcgtacccgcctgaattcggcgcgcctggcccatgatgatcaacagcactacatgagccgcttgagccgcgaacacgaagaaatctatgaggcgattgcccgccaggattcggatgcggcacgggcggcgatgcgcttgcatttgaccaacagtcgcgagcgactgcgccatgcccatgaagaggcagaggcgcagcggggctgatcgttcccacgctctgcgtggtaacgcctctatggacgctccgcgtcccgatgcgcgtgaatttctcaagccctcgcagggcgacgcggagcgtcataggctgtattcccacgcagagcgtgggaacgatcatgccagccgttagttggcgggttggtttggcttgtagtccttaagcaataagtacgtgctccacccccaccaatcattagtccagtgcttgtcgttcaaatcattgacgtccttgcgccgcagcaccttgtccccctccatcttgaacagcggcgagaagttattcgccgggttttgcgcggcgttcaggtcgggcacatacagcggtgccttgaactcagctggggagggcgcgatgccgctgatgaaggtttcgaagatctcatcggccgaggcctgtacggcccctttgacctgcacgcgattgtcggcgtcgatgctgtcgaagtagcgcttgtcgccgtaggcatgccactgagcgcccatggcattgcgcaccttgagcccgaatttactgtcttcatcgtgcatgaagcggctgatcagcgagccgagttctcctggcgtcaccactgccgccagttgtttgcgcggtacccgcaggtggccggcggaaaacaggtcggtcaaaaagtgatcggcaaagctgttcatggcgtaagccaattccagggcctggtcggtgccggtctgatgagccaccacggcctgttgcagagccgctgcgtgaccggccaaataggcggacagggcccattcaccgaagtggtcggcgttgtccgctgccagcttcaggtagcggcccaacggtacgagggccgaaacagcactgccgccgccggttatgcgattccactcctcggacaacgtatctcccagggcgtcataggcttcatgaggctgtttgccgtccttgatcgcctggttgacggcgttgatctccttttgcatcaccgccaggatcttctgcgcttcttcccgtgaagcaggcaacacggcgagagaattgaacgccgcggtgaagcgttgcacgcgctcggtcggagaattgccatcgctgatcggttggccggggatgccatagaagtcgccgcccagggcgatcacttggccataggtcagcgcaagcccgttgggcaggtgcagttcgacttggcgcgcaggaatggccgaggcgtccttgctgaagcgaagcagggtgtcatcgccgatggcggtgtgttcaccgccttcgaagcgcagggtaggcggagttttttcgggtgctgcgagttcaagacctgacatgttagctccttgctatgtcgtaggaatcttccgtgataactgtatgtatatacagtcaactgaatcataggtgagaaatttcctacgtcaagagccgcgtcttaagccctcgttggattacgccggatgaattgcagttgacgaatttatttatagttgtacgatgacgtacgacatcatcaaaaccaacaacaacctttcgtaagaaagtcttcgcccagggtgttcgaataatgaatccacaagaactgaagtccatcctctcccacggtctgctgtctttcccagtgaccgatttcaacgcccagggtgatttccaccaggcgggttacatcaagcgcctggaatggctggccccttatggcgccagcgccttgttcgccgcgggtggcacaggtgagtttttctccctggcggccagcgaatattcccaggtggtgaaaaccgccgtggatacctgtgcgtccagcgtgccgatcctggccggtgtaggcggtgccacccgccaggccatcgagtacgcccaagaggccgaacgcctcggcgccaaaggtttgctgctgctgccgcactacctcaccgaagccagccaggacggggttgccgcccacgttgaagccgtgtgcaagtcggtcaagatcggcgtggtggtgtacaaccgcaacgtctgccgcctgaccgcaccgctgttggagcgtctggccgagcgctgcccgaacctgatcggctacaaggatggcctgggtgatatcgagttgatggtgtcgatccgccgtcgtctgggcgaccgtttcagttacctcggtggtttgccgaccgcagaggtttacgccgcagcctacaaggccctgggcgtgccggtgtactcctcggcggtgttcaacttcatccctaagaccgcgatggatttctaccacgccattgcccgcgaagatcacgccaccgttggcaagatcatcgacgacttcttcctgccgtacctggatatccgtaaccgcaaggctggttacgcggtgagcatcgtcaaggctggtgcgaaaatcgtcggttatgacgccggccccgtgcgcacgccactgaccgacctgctgccggaagaatacgaagcccttgctgcgctgatcgacaagcaaggcgcgcaataaattatccacaaggccgctgagcaatcagcggccttttgcgtcaggagaagattcgtgtcccaagcaaagcgttttgaaaactacatcaatggccaatgggtaaccggcgccgactactgcaccaatatcaacccgtcggatgtgtccgacgccattggcgaatacgccaaagccgacgtggcccaagtcaacgcggccatcgacgctgcccgcgccgcgttcccggcgtggtccacctccggtatccaggcgcgtcacgatgcgctggataaagtcggcagcgaaatcctcgcccgtcgtgaagaactcggaaccttgctggcccgggaagagggcaagaccctgcccgaagccattggcgaggtgacccgcgccggcaatatcttcaaattcttcgccggtgaatgcttgcgcctgtcgggcgattacgtgccgtcggtgcgcccgggcgtcaacgttgaagtgacccgcgaagccctcggtgtggtgggcctgatcactccgtggaacttcccgattgccatccccgcgtggaaaatcgccccggccctggcctacggcaactgcgtggtgatcaagcctgccgaactggtgccgggctgtgcctgggccttggcggagatcatctcccgcgccggcttccctgccggtgtgttcaacctggtgatgggcagtggccgtgtggtcggcgacgtgctggtcaacagcccgaaagtcgatggcatcagtttcaccgggtctgtgggcgttgggcgtcagatcgccgtcagctgtgtctcgcgccaggccaaggtgcagttggaaatgggtggcaagaacccgcagatcattctcgacgatgccgacctcaaacaagctgtcgagctgtcggtccagagtgcgttttactccaccggccagcgttgcaccgcctcgagccgtttgattgttactgccgggattcacgaccagttcgtcgccgccatggccgagcgcatgaagtcgatcaaggtcggccacgcgttgaatagcggcaccgacattggcccggtggtgtcccaggcccagttggatcaggacatgaaatacatcgacatcggccagagcgaaggcgcccggctggtgagcggtggcggcctggtcacctgcgacaccgaaggctattacctggcgcccacactgtttgccgacagtgaagcggcgatgcgcatcagccgtgaagagatcttcggcccggtggccaacgtggtgcgcgtggccgactacgaggccgcgctggccatggccaatgacaccgagttcggcttgtcggccggcatcgccaccacctcgctcaaatatgccaaccacttcaagcgacactcccaggccgggatggtgatggtcaacctgccgacggcgggggtggattaccacgttccatttggtggccgtaagggctcatcctacggttcgcgtgagcaaggtcgctatgcgcaagagttctacaccgtggtgaaaaccagctacatcggttcgtaacacgcagcaccctgtggcaccggccttatgtgggagctggcttgcctgcgatagcatcacctcggtctagctgacacaccgaggtgcctgcatcgcgggcaagcccggctcccacaggaaaaacaaaaaatcattacccgcaaaaaaaataattagtgggagtacttctacatgcaagcgaccaagccgacccacgtccgctatttgatcctgctcatgctgttcctggtgaccacgatcaactacgccgaccgggccaccatcgctatcgccggctccagcctgcaaaaagacctcggtatcgacgcggtcaccctcggttatatcttctctgcattcggttgggcctacgtggccgggcaaattcccggtggctggctgctcgaccgtttcggctcgaaaaaagtctatgccctgagcatcttcacctggtcgctgttcaccgtgctgcaaggctacgtcggtgagtttggcgtctccactgcggtggtcgcgctgtttatgctgcgcttcatggtgggcttggccgaggcgccgtcgtttccgggaaatgcccgtattgttgcggcgtggtttcctacggctgaacgcggcactgcgtcggcgatcttcaactcggcccagtacttcgccacggtgctgttcgcgcccttgatgggctggatcgtctatcgcttcggctggcagcacgtgtttattgtgatgggcgtgatcggcattgtgttctcgctgatctggctgaaagttatccacagcccgcgccagcatccgatgatcaacgaggccgagttcaatcacatcgcggccaatggcgcgatggtcgatatggaccaggacaagggcaagggcaagaaaaccgacgggccgaagtgggattacatccgccagctcctgaccaaccgcatgatgctcggcgtctacctgggccagtactgcatcaacggcatcacctactttttcctgacctggtttccggtgtacttggtgcaggagcgtggcatgaccatcctcaaggcgggtttcattgcttcgttaccggcgatctgcggttttatcggcggggtgctcggtggggtgatttccgactacctgctgcgcaaaggccattcgctgaccttcgcgcgcaaggcgccgatcatcggtggcctgctgatttccagcagcatcgtggcctgcaattacgtagacatcgaatggatggtggtgggcttcatggccttggccttcttcggcaaaggcgttggcgcactgggttgggcggtggtgtccgacacctcaccgaaacaaatcgccgggctcagtggcggcttgttcaacaccttcggtaacctggcgtcgatcaccacgccgattgtgattggctacatcatcagcaccaccggctcgttcaaatgggccctggtgttcgttggcgccaacgcgctggtggcggtgttcagttacctggtgattgtcggcccgatcaagcgtgtggtgctcaaggagccgcctacccagggccctgagttgaccaacctttctcaagcgcattcctgaggttcgtgtgatgcagttgattgaacatgccgactcgccgcgctcgatccgtttgcacgagcgcgacaatgtggtgatcgtggtgaacgatcaaggggtgcccgccggtaccgagtttcccgacggcctggtcaccgtggatttcatcccgcagagccacaaggtgaccctggaagacatccccgagggcggccagattattcgctacggccagaccatcggttatgccctggcgccgattccccgcggcagttgggtgcaggaggaccagttgcgcatgcccaccgcaccgccgctggacagcttgccgctgtccaccgaggtgcctgaaacccaggcacccctggaggggtttaccttcgagggctatcgcaatgcggacggcaccgtgggcacgcgcaatatcctcggcattaccactaccgtgcaatgcgtcacgggcgtgctggaccatgcggtcaagcgcatcaaggacgagttgctgcccaactacccgcatgtcgatgacgtggtggcgctgacccacagctatggctgcggcgtggcgattacggcgacggatgcctacatccccatccgcaccgtgcgcaacctggcgcgcaaccccaacctgggcggcgaagccttggtgatcagcctgggctgcgaaaagctccaggccggccaggtgatgcacgacaacgacagttctgtagacctgagcgagccgtggctgtatcgcctgcaggattccagccacggctttaccgaaatgatcgagcagatcatggccctggccgacgtgcgcttgaaaaaactcgaccagcgtcgccgcgaaaccgtgccggcctccgagttgatcctgggcatgcagtgcggcggcagtgatgcgttttccgggatcactgccaacccggcgctgggctatgcctcggacctattgctgcgcgccggcgcgacggtgatgttttccgaagtgactgaagtgcgcgatgcgatttacctgctgacttcacgcgcgcaaaacgaagacgtcgcccgcgagctggtcagggaaatggactggtacgaccgttacctggccaagggcgaggcggaccgtagcgccaatactacgccgggtaacaagaagggcgggctgtcgaatattgtcgagaagtcgttgggctccattgtcaaatccggcagcagtgcgatcaacggtgtgcttggccctggggaacgcttcaaggaaaagggcctgatcttctgcgccacaccggccagtgattttgtctgcggcaccttgcaactggcggcggggatgaacctgcacgtgttcaccaccgggcgcggcacgccgtacgggctggcgatggcaccggtggtgaaggtctccacccgcaccgagctggcccagcgttggccggacctgatcgatatcgacgccgggcgcattgccacggggcgcgcgagcatcgaggagctggggtgggagctgttccacttctatctggatgtggccagcggcaagaagcagacctgggcagagcggcacaagctgcataacgacatcacgctgttcaacccggcgccgattacctgaaaccaggcgctaaccctgtaggagcgagcttgctcgcgaaaaacgtcaacgataacgcgtgttaactgaatgaannnnnnnnnnnnnnnnnnnnnnnnnnnnnnnnnnnnnnnnattcagttaacacgcgttatcgttgacgtttttcgcgagcaagctcgctcctacatttgaagtgcgttgcccacacgaacccgctcgtactggcttatcattagccaactaacgacgcccaccaaggttctccccggcatgctggcaatcttcctcaccaccctcaccatcaccgcgccggtgtttgccatgctgttcctgggcgtgtttctaaagcgcatcaattggatcaacgacaactttatccacaccgcatcgtccctggtgttcaacgttgccatgccggcgctgctgttcctgggcattctgcatgccgacctgcactcggcgctcaaaccggggctgctgatctacttttgcgtcgccaccttggtgagctttgccatggcctggggctgggcgatctttcgttgcaagcgcgaagaccgaggcatctacgcccagggtgcgtttcgtggcaataacggggtcatcggcctggcgctggcggccagtatgtacggcgactacggcatatccctgggcgcgatcctcgccgcgctggtgatcctcttttacaacacgctgtcgaccattgtgctggcggtgtatagcccggtgatcaagtccgacccgtggagcatcttcaaaagtgtattggccaacccgctgattatcagcgtgatcgtcgccacgccgttcgcgtacttccagatcggcgtgcccggctggcttgagaaatccttgcagtacctgtccgacaccacgctgccgttggcgttgatttgcatcggcggcaccttgtccatggccgcgttgcgcaagagcggcaacatggcgttgagcgcaagcctgatgaagatgatctggctcccggtgatcgcgactctgggcgcgtggttgctggggttccgagggccggagttggggattctgttcctgtatttcggcgcgccgactgcggccgcgagctttgtgatggctcgggcggcggaagggaatcatgaactggcggcggcgattatcgtgatcaccacgctgatggcggcggtgaccacgaatatcgggatttttgtgttgcaggcgggtggttggatctgaaataggcgggcagcttaaggccccatcgcaggcaagccagctcccacacttgaaggtattcacacatccacatgtgggagctggcttgcctgcgatagctatctggcagtcactgctgatcggcctgatacgcctcaatcacttcctgcgccgcccgaaatgcatcaatcgccgccggcaccccggcatacaccgcgcaatgcagcagcgcttcgcgaatctcttcaaccgtacagccattattcagcgcaccgcgcacatgccccttgagttcctgcgagcacttgagggcggtgagggcggcgagggtgatcaggctgcgggtcttgagtggcaagccttcgcggttccagacgctgccccacgcgtgctcattgacgaagtcctgcagcggttgggtgaacgccgttgcattgcccagggcgcggtcgacgaacgcatcgcccatgacttggcgacgcacttcaacccctggctttttctgatcggtcattgcgattccctcttgtgttggcggtgccaggcgcgcagtgaggtgaataacagcagagcgcctaacgccggcaggacgtaatacagcatcaattgttcaagcttgttggccagcggcatgccggtggtgaacgccatcacatgcaggccgtaggccaggtacagccccagcagcaccaccccttcgatgcgtgttacccggtagccggtatagaacaccggcaggcacaggatgatggcgccgagcatcactggtaaatcgaagtccagggcgttgggcgataccgacagcggtgtcggcgccaccagggcggtaaaacccagcacgccgagcaggttgaacaggttgctgccgatcacgttgcccacggcgatctcccgttcgccacgcaaggcggcgatcagcgacgtggccaggcacggcagcgaggtgccgacgccgatcaacgtgaggccgatgacgcgctccgataatccgagatcgcccgccacctcaaccgctgcgccgagcaacaaatgcccggccagcaccagcaccagcaagccgccgagcatcagcagcacactgctcagccatggcgctttggccacggtgtcgagggtgcgcgggcggcgggagtggcgtgtctggtaatgcaatacgcccaggtaagccagcagcgccaccagcagcacggcgccatcgaagggcgtcagcatttcattggcggccaggataaacaccagcaggccggcgacgatcatcaccgggatatccacgcgcaccagctgccgcgagactcgcagtggaatgatcagtgcggacaagcccagggtcacgaggatattgaagatgctgctgccgatgacgctgcctacggcaatgtccgtgttgccagccagcgtggcctgcaggctgacggtcatctgtggcgcactgctgccgaaggcgacgatgctcaagccgatgatcagtggccgcaccttgaggctggccgccaggcgcaccgcagcgcgcaccaggatttcagcgccgacgatcagcaagatcaggccgcccaccagttcgagcaggctccagggcgatagggcgttcaatccgaaaatgctcaaggctgcctcgatcagttgttcagggcttgcacgcgaacccgcgcggtaccgctgctcagcatgcgcagttgctcggcagccttgcgtgaaaggtcgatcaggcggccacgggtatgcgggccgcgatcattgatacgcaccacgacagaacggttgttgtcgaggttggtcaccttgacctgggtgccgaagggcaggcgccgatgggcggcggtcaaggcgttctggttgaaaggttcaccgctggcagttctcttgccatggtgcttggcgccgtaataggacgcggtgccggtttcgtcgtagccgttggggtcgatgaggccgctggcgcaaccggccagcagggaggacaaggccaggaggccgagtagacgcttcatttcaagatgtccccgttggatcgttcccacgctctgcgtgggaatgcagctggtgacgctacgcgtcacaaaagcggacgcggagcgtcccgtgagacgttcccacgcagagcgtgggaacgatcatggatcagccttcgagcttgcttttgagcagttcgttcacctgttgcgggttggctttgcccttggaggctttcatcgcctggccgacaaagaagccgaacatcttgccgcgcttggcttcgtctgccgcgcggtattgctcgacctgctcggcattggccgcgagcatttcatcgagtacggccgagatggcgccgctgtcggtgacttgcttgaggccacgcttctcgatgatctcgtcggcattgccttcaccgacggccatcgcttcgaacacagtcttggcaattttgccggagatggtgttgtccttgatgcgcagcagcatgccacccagttgttcggcggtgaccggcgcttcgtcgatttccaggccctgtttgttcaacaggctgcccagctcgaccatcacccagttggccgccagcttggcgtcgccggcaatgctcacgactttttcgaagtagttggcttgttcgcggctggaggccaatacgctggcatcgtagaccgacaggccgaactgttcctggaagcgttcgcgtttttgctgcggcagttccggcagggtggcgcggatgtcattgaggaaggaatcctccagcaccaccggcaacaggtccgggtcggggaagtagcggtagtcgttggcttcctctttgctgcgcatggcgcgggtttcgtctttgttcgggtcgtacaggcgcgtttgctggatcaccttgccgccgtcttcgatcagctcgatctggcgacgtacttcgctgttgatcgccttctcgatgaagcggaacgagttgacgttcttgatctcgcagcgggtgccgaactcaacctgacccttggggcggatcgacacgttgcagtcgcaacgcagcgagccttcggccatgttgccgtcgcagatgcccaggtagcgcaccagcgcgtggatggtcttgacgtaggccacggcttccttggcgctgcgcatgtccggctcggacacgatctccagcagcggcgtgccggcacggttcaggtcgataccggtcgcgcccgggaattcttcgtgcaggcttttgccggcgtcttcttccaggtgcgcacgggtgacgccgacacgcttgatggtgccgtcttccaggggaatgtccaggtggcccttgccgacaatcggcagttccatctggctgatctggtagcccttgggcaggtccgggtagaagtagttcttgcgcgcaaacacgttgtgctggcctatctcggcgtcaatcgccaggccgaacatcaccgccatgcgcaccgcttcctggttcagcaccggcagcacgccgggcatgcccaggtctaccaggctggcctgggtattgggctcagagccgaacgtggtggcgctaccggagaaaatcttcgattgggtggcgagctgggtatgaatctccagcccgattacaacttcccattgcatagtgttctcctcagaagccggtaggggtgcgggtgtgccagtcggtgttcaactggtactggtgcgccacattgagcaggcggccttcctggaaatacggggcgagcaattgtacgcccaccggcaggccatcgacgaaacctgcgggcatggacaagcccggcaagcccgcgaggttggcggtgatggtgtagaggtcttccaggtactcggcgatcgggtcgccggtcttggcgccgatcttccacgccaggttcggcgcggtcgggccgaggatcacatcgacttcttcaaaggcggccatgaagtcgttcttgatcaggcgacggattttttgcgccttgaggtagtacgcgtcgtagtagccggccgacagggcgtaggcgccgaccatgatccggcgctgcacttcactgccgaagccttcgccacgggagcgtttgtacaggtcggtgaggtctttcgggttttcgcagcgatagccgaagcgcacgccgtcgaaacgcgacaggttggaagacgcctctgctggcgcgatcacgtagtaggcgggaatcgcatgctggttgttcggcaggctgatttccttgatcacggcgccaagtttttccagctctttgatgctgttttgcaccagatcggcgatacgcgggtcgaggccggcgctgaagtattccttcggcacgccgatgcgcaggcccttgatcgaggtgttcaggctggcgctgtagtccggcacgggctcgtcgatgctggtggagtcctgtttatcgaagcctgccatgccttgtaacaatattgcgcagtcttcagcggtgcgtgccaacgggccgccctgatcgaggctggacgcataggcaatcatgccccagcgagacacacgaccgtaggtcggcttcaggccggtgaggttggtgaaggccgctggctggcggatcgaaccgccagtgtcggtggcggtagcggcgggcaggaagcgcgcggccacggccgccgccgaaccaccggacgaaccacccggcacgtgttcaaggttccacgggtttttcaccgcgccgtagtagctcgactcgttggccgagcccatggcgaattcgtccatgttggtcttgcccagggtcacggtaccggcagcggccagcttggcgaccacagtggcgtcgtagggcgccttgaagttgtcgagcatcttcgagccgcagctggtgcgaatgccctgggtgcagaacaggtccttgtgggcgatcggtgcgccaagcagcgcgccgttctcaccgttggcgcgacgggcgtcggcggccttggcctggctcagggccagctcctcggtgaggctgatgaagctgttgaccttcggatcgagcgcggcgatacgcgccagcaaggtctgggtcagctcttcgctggaaaacgatttgtcggcgagaccgcgggcgatctcggccagagtcatgtgatgcatgaaaggctctttccctttagtcgatgactttcggaaccaggtacaggccgttttcgaccgctggcgcgatggactggtaggcctcgcgattattgcgttcggtcacgacgtctgcgcgcaggcgctggctggcttccagtgggtgagccaggggctcgatgccgtcggtattcacggcttgcatttggtcgaccagcccgagaatgctgttcagggctgcggtggtctgtggaagatcggcatcattaaggccaagcgaggccaaatgtgcgattttttccacgtcggagcgttcaagcgccatgggattctccagtggaaaacagaacggagggcgtccgtgtgttagattgtcggaacactaccgcatttctacggtcataaggccgcgattgtgggggttggtgcacagaaagtcggccaatttagcacattggcgccttgcccaaaatccctgtcgttgttagagtttgccgcacttttttacccacgcgttgcctagggtcctttccccatgttcaagaaactgcgtggcatgttttccagcgatctctccattgacctgggcactgccaacacccttatttacgtgcgcgagcgcggtatcgttctgaatgagccatcggttgtggccattcggacccatggtaatcagaaaagtgtcgttgccgttggcaccgaggccaagcgcatgctcggccgtacaccaggcaatattgctgccattcgtccgatgaaggatggcgtgatcgccgatttcagcgtctgcgaaaagatgctgcagtacttcatcaacaaagttcacgaaaacagttttctgcagcccagccctcgcgtgctgatctgcgttccgtgcaagtccacccaggttgagcgtcgcgccatccgtgaatcggcccttggcgccggtgcccgtgaagtcttcctgatcgaagagccgatggccgctgcgatcggtgccggcctgccggttgaagaagcacgcggttcgatggtggtggatatcggtggtggtaccaccgaaatcgccctgatttccctgaacggtgtggtgtatgccgaatccgtacgcgtgggcggtgaccgtttcgacgaagcgatcatcacgtatgtgcgtcgtaactacggcagcctgatcggcgaatccaccgccgagcgcatcaagcaggaaatcggcaccgcttacccaggcggtgaagtgcgcgaagtcgatgtgcgcggtcgcaacctggccgaaggcgttccacgtgccttcaccctgaactccaatgaagtgctggaggctctgcaagagtccctggccaccatcgttcaggcggtgaaaagcgccctggagcaatcgccgccggagctggcttccgatatcgccgagcgtggcctggtactgaccggtggtggcgccttgctgcgcgacctcgacaagttgctggcccaggaaaccggcctgccggtgatcgtcgccgaagacccgctgacctgtgttgcccgtggcggtggtcgtgcgctggaaatgatggataaacacaccatggacctgctctccagcgaataagattgcctggatggttcatgcttcgtcggcaggcagcactttgcagtgctgcctgttggcgtttatcttcttcaatctgcatccaggccggtttgatgccgtatgaataaagagaacatttgcctgggaggagcggcttattaaaccgcttttcgccaaaggcccctcattgggtgtgcgcttattggtgctgaccgtgctttcggtcgcgctgatggtggtcgatgcccgctttgcactgctcaagccggtgcgtagccagatgtcgctggtgttgatgcagacctactggatcaccgacctgccgcaacgtctattccagggtgtgtccagccaatttggcagccgcaccgaactggtcgccgagaacgaaaaactcaagactgaaaacctgctgttgcaggggcgcatgcaaaagctggcggccctcaccgagcagaacgttcggctgcgcgagttgctcaattcttccgcgctggtcaacgaaaaggtcgaagtggccgaactgatcggcatggaccccaacccctttacccaccgcatcatcatcaacaagggtgagcgcgacggtgtggtgcttggacagccggtgctcgacgcccgtggcctgatgggccaggtggtggagttgatgccctacacctcgcgggtgctgttgctgacggacaccacccacagcatcccggtacaggtcaaccgtaacggcctgcgcgcgattgccagcggcaccggcaacccggaacgcctggagctgcgccatgtggccgacactgcggatatcaaggaaggcgacctgctggtcagttctggcctgggccagcgcttcccggcgggttatccggtggcgacggtcaaggaagtgatccacgattccggccagccgttcgctatcgttcgggcggtaccgactgccgcgctgaaccgcagccgttacctgctgttggtgttcagcgacaaccgcaccccggaagagcgcgccaacgacgccgcccaggcccaggaagcggaagaccagcagaatggtaccgcgcctatcgtgccggccacggtgccgaaaccggctttcgtcggtccgcctgcccctgcggcaacaactgcaccggcaccggcggcaacgcccgctcaaccggcagcgcacaacgcgcgcccggctaagccggctgtagccaaacccccggccactgcgccgagcaccgctccgaccaccacacggcagagggagcaataatggccggtactcattcacgcaatggctggatcgtctggctgaccttcgccatcggcttgctgctcagcgtttcgccgctgccgcagtttatggaaatcctgcgcccgctctggctggccttgttgctggcgttctggtcattgaacctgccgcacaaggtgggcatggtcacggcgatgtgcctggggttggccgaagatgtgctgtatggcaccttgctgggccagaacgcgttgatcctcaccctgattacctttctggtgctgtcgttgcaacagcgcttgcgcatgttcccgatgtggcagcagtgtttggtgatcctggtgatcttcggcctggcgcagttggtgcaactgtggctcagcgcgttgactggcaaccgccagccgaccctggcgctggtcttgccggcgctggtcagcgccttgttgtggccctggatcagttttggcctgcgtgggctgcgtcgtcgctataaaatcaattgaatggattgcgaggctctgcctggttatcgaaccccacagggagaggctgcaatgaattcgctttatctggcctcgggctccccgcggcgacgtgaactgctggtccagatcggtgtgccctttaccctggtcagcgccgctattgatgaaacgccccttaacaacgaacctgccgttgcctatgtcgagcgccttgcgcggggcaaggcgacggcgggttttgttgcgcttggccacacctcaaacacctgcgtgctaggggccgacacggcggtgattgtcgacgggcggatcctgggcaaaccggtggaccaggctgatgcactggccatgctgatggccctttccggccgcgagcatgaagtgcttaccgccattgccctgaccgacggccagcaatgtgaaacccgatgtgtcagcagccgtgtacgtttccgcgaggtttctgtgcaggaggctaccacctactggcacagtggcgaaccgcaggacaaggctggcggctatgctatccaagggctgggttcggtgtttgtggccgggcttaatggcagttattccgccgtggtgggcctgccagtctgcgaaaccgcgcaactgctcgcccaattcggcataccctgttggcaaaaccttaccgtgtgctgaacgccgtattccagcgccaagccttaagcgaccggtcactattgtgaaaacgcctgaacgagacccagccatgagtgaagagattctgatcaatatcacgccgatggaatcgcgcgtggcggtggtagagaacggtgttctgcaagaagtgcatgtcgagcgcacccagaagcgcgggatcgtcggcaatatctacaaaggcaaggtggtgcgcgtattgccgggcatgcaagcggccttcgtcgacatcggcctggaccgtgcagcgtttatccatgcctcggaaatttccctgcgcgaaggccctgcggtggaaagcatcagcgccctggtgcacgaaggccagagcctggtggtgcaagtcaccaaggaccctatcggttccaagggcgcccgcttgaccacccagctgtcgattccctcgcgctacctggtgtacatgccgcgcaccgcccatgtgggcatttccctgaagatcgaagatgaagccgagcgcgagcgcctgaagaaggtggtcagcgactgcgtcgccgccgagggcatcaaggaagcgggtgggtttatcctgcgcaccgccgcagaaggcgctggcgcggatgaaatcctcatggatattcgctacctgcggcgcctgtgggaccagatcgacgcacagatcaagaccatcggcgcgcccagcgtcatctatgaagacctcggcctggcgctgcgcacgctgcgcgacctggtcagcccgaagatcgagaaaattcgcatcgactcgcgggaaaccttccagcgcaccacgcaatttgtcgctgagttgatgccagaaatcgccgatcgcctggaacactaccccggcgagcggccgatattcgacctgtatggcgtcgaagacgaaatccagaaagccctggaacgcaaggtgccactcaagtccggcggctacctggtggtagacccggcagaagccatgaccaccatcgacgtcaataccggcgcattcgtgggccatcgcaaccttgaagagaccatcttcaagaccaatctcgaggcggctaccgctattgcccgccaactgcgcctgcgcaacctgggcggcatcatcatcatcgacttcatcgatatggaagatgaagagcaccagcgccaggtgctgcgtacgcttgagaagcaactggaacgcgatcacgccaagaccaacatcatcggcatcaccgagctgggcctggtgcagatgacccgcaagcgcacgcgcgaaagccttgagcaggtactgtgcgaaccgtgcagcagctgccagggccgcggcaaattgaagaccccggaaacggtttgctacgagattttccgcgagatcctgcgcgaggcacgcgcctaccaggccgaaggttatagagtacttgccaatcagaaggtggtggatcgcctgctggacgaagagtccggtaacgtcgccgaactggaaagttttatcggtcgcaccattcgcttccaggtcgaaaccatgtattcacaggaacaatacgacgtggtgttgctctgatccccagctgtgcactttcttcgagaccggcagaccttgatctgccgtccgctaactgttttttgagggtcgcctgacatggagcgtctgatacgcttttttgccgctttgacccgttggggcctgggcctgtgcgccttgttgctggtattggcagcggtgtacgtgagcctggggcgcgaactcaccccgctggtggccgaataccgcgccgaagtcgaagccaaggctcaggcggcgctggagacgccgctgcatatcggtagccttgaaggccgctggagcgggtttgccccggtattgctggctcacgacgtcatggtcggcgagggtagcagtgccttgcgcctggaccaggtggaagtggtgccggatatatgggccagcctgttggcccgcgaagtgcgcatcgctcatctgcaagtcagtggcctgcaactgagtgtcaaggaagaccaggacggccgctggaccctgcaaggcttgccggtgcaggacgaccagccgttggacccgcagcaactgctgacgcgcatgcaaatggtcaagcgcgtgtcggtgctggacagccaggtgaccctgcaaccgttcgaccaggcgccggtgaccgtgacctatgtgggcctgagcctgcataccggcatgagccagcagcgtctggacgctcgcctgaccttgcccgatggccaaccgttggccgtcagcctgcgtagccgcattcgcgccagccagtggcaagacgctgaggtcgatgcctacctgagcctgccgcaaagcgactgggccaagtggattcccgcgaggctgacccagcaatggaagctgacgcaattgaaggccggcggcgagttgtggctcagttgggccaagggtacggtgcaaagcgcggcggtacgcctcaattcgccccaagtgaagggcagctacgccgaccgtaagccggtacaccttgaaaacctggccctgaccgcctacctgaagcgcagtgacactggcctcaaggtgctgttcgattccctggcgatgaacattggcgaaacccgttgggagtcgcgtctgcaattgcagcaaagcctggccaccgacaaggagcaggaagtgtggaagttgcaggccgatcgtctcgacctcactcccatcacaccgctgctcaacgccttggcaccgctgccggacggctttgccaaggccgtcgaacacctcaaagccaccggcctgttacgcaatgtgctggtggacttccgaccacaagacaccactgaccgcaaactcagttttgccgccaacctggagcgtgtcggcttcgatgcctactttggcgcgccggccgcacgcaatgtgtccggcagcatcagtggcgacctgggccagggcgagttgcgcatggacagcaaggacttttccttgcatctgtatccgatcttcgccaaaccttggcagtacatccaggccaatgcgcgcctgacctggaagctggacaagcaaggcttcaccctgattgccccgtatatcaaggtactgggcgaggaaggcaaggtggcggcggacttcctgattcgcctgcatttcgaccacagccaggaagactacatggacctgcgggtcggcatggtcgatggcgatggccgtttcactcccaagtacctaccggccgtgttgagcccggcgctggatgaatggctgcgcacggcgatcctcaagggcgcggtggacgaaggcttcttccagtaccagggttcgctgagccacaatgcgctgccggcgtcgcgcaatatcagcctgttcttcaaggtgcatgatgccgaactggccttccagcccggctggcctcatgtgaacaaggtcaatggtgaagtgttcgtcgaggaaagcggcgtacgcatcctggcgagcaagggccagttgctcgacacccaggtcaaggatgtctacgtcaatatcccccacgccccagcgggcggggacagtcatctgctgctcacgggcgggttctccggcggtttgggcgacggcctgaagatccttcaagaagcccctatcggcacggcgcctacgttcgccggttggaaaggcgagggcgacctgcaaggtagcctggacctggacgtaccgctggccaaaggcactgagcccaagatcgtggtggacttcaagaccgacaaggcgcgcctgcaattggcggaaccgcccctggaactgacccagctcaagggtgattttcgcttcgacagcgccaagggcctgagcgggcagaagatttcggcccaggcgttcgaccgccccatcacggcgcagatttttgccgaaggcaagccgggtaatatcagcactcgcgtgaccgccaatggtcaggtcaccgtcaagcgcctcacggactggttgaaaatcagccagccgttgccggtctccggcgatattccctaccagttgcaagtgatcctcgacggcgcagacagccagttaatggtcaattccaacctcaagggtgtcgcggtggacctgccggcaccgttcggcatgccggccagccagggacgtgacagcacctttcgcatgactttgcagggcgctgagcgccgttactggtttgattacggcgagctggctaacttcacctttgctgcgccgccggacaagttcaatgatggccgcggcgaactgttcctaggcgatggtgatgccgtgctgccgggggccaagggcctgcgcattcgtggcgtgctgtcggaactggatatcgatccctggaagaaactcgtggatcgctacgcgggcaatgatccaggtggcaatgccaagcaactgctcagcggtgcggacttcaaggtgggcaagctgaccgggtttggtacccagtttgaccaggtcagcttgcagctcgatcgcaaaccagcggcctggggcctgcaactcgatagccagcaagccaagggcacggtgaacctgccggacgccaaaggcgcgccgattgcagtcaacctcaagtatgtgaaattgcctgcgccagacccaaccgcgcaggcggacgaaaacgcgccggacccgctggccgatatcgaccccaagagcattccggccctggatattgccgtcgaccaattgttccagggctcggacctgatcggcgcctggtcgctgagaatccgcccgaccgccaagggcctggctttcaataacctcgaccttggcctcaagggcatgttgctcaagggcgccgggggctgggaaggtgcgccaggcgccagcagcagttggtacaagggccgcctcgacggccgtaacattgccgacgtgctcaaagggtggggttttgcgcctacggtgaccagcgaagactttcatctggacgtggatggccgctggccgggttcaccggcctgggtcgggcccaagcgcttttccggcagcctggatgctgcgttccgtaaaggtcagttcgtcgaagtggagggcggggcccaggcattgcgagtgtttggcctgcttaacttcaactccattggccggcgtttgcgtttggacttttccgacttgttcggcaagggtttgagttatgaccgggtcaaaggcttgttggccgccagtaatggtgtgttcgtgacccgcgagcccatcaccatgaccgggccttccaccaatcttgagcttaacggcaccctggatctggttgccgatcgcgtcgacgccaagttgctggtcaccttgcctgtgaccaacaacctgccgattgcggcgctgattgtcggtgcaccggccattggtggtgcgctgtttttgatcgacaagctgatcggtgaccgggtttcgcgctttgccagtgtgcaatacaaggtgcagggcccttggaaggatccgaaaatcaccttcgacaagccatttgaaaagccaaactgagagcctgtggagtagcatggccccatgccctgtatggagtgtcggcccatgtcctttgcggtaattcaaatggtcagccagagtgacgtgctggccaacctcgcccaggcgcgtcgcctgctggaacaggcggcggccggcggcgcgaaactcgcggtgctgccagagaatttcgccgccatggggcgccgcgatgtggccgacattggccgcgccgaggcgttgggccaagggcctgtgctgccctggttgaaacaggtcgcccgcgacctcaccttatggatagtggccggcacattgccgttgccgccccaggaccagccccacgccaaacccaatgcttgctcgctgctgatcaacgatcagggtgaaatcgtcgctcgctacgacaaactccatctgtttgatgtggacgtagcggacgctcgcggtcgttatcgcgaatctgacgactatgctttcggtaaccaggtggtggtggcggatacgccggtgggccgtgtggggttgacggtgtgttacgacctgcgtttcccggagctgtacagcgagttgcgcgcggcgggggctgaactgattaccgcgccttcggctttcacggcggtgaccggggctgcgcactgggatgtgcttattcgtgcgcgggccattgaaacccagtgctacttgctggcggccgcccagggtggtgtgcatccagggccacgggaaacttttggccacgcagcgattgtcgacccttggggccgagtgctggcgcaacaggatcaaggcgaagcggtgttactggccgaacgcgatagcagtgaacaggcgtcgatacgggcgcgcatgccggtggccaatcaccggcgctttttctcgcagggcgcgcagcggcctgcttcagaacgatgaatttaaggccaaacctatgagcgagttgttgtcctcagtcagtgatcacctcctggcacccggtggcgtgaccatcgaaagcctgcaaaccgtgctcggcgatctggccgggccgggtatcgatgcggctgacctgtatttccaggggcagatttccgagtcatgggcgctggaagatgggatcgtcaaggaaggcagtttcaaccttgaccagggcgtaggcgttcgcgcgcaatcgggtgagaagaccggctttgcctacagcaatgcgatcaccctggaggccttgggcctggcggcgcgtgccgcccgttcgatttcccgtgccggccagaatggcacggtgcaggcattcagtacccaggacgtggcccagttgtatgcgccggataaccccttggaagtgatcagccgtgcggaaaaagtcgagctgctcaagcgtatcgacgcagctacccgcgctctggacccgcgtatccagcaagtgaccgtaagcatggccggcgtgtgggagcgcatcctcgtggcgtccaccgacggtgggctggcggcggatgtgcggccgctggtgcgtttcaatgtgagcgtgatcgtcgaacagaacgggcgccgcgagcgcggtggccatggcggcggcgggcgcaccgactaccgttatttcctcgctgacgaccgtgccatgggctatgcccgtgaggcgctgcgccaggcattggtcaacctggaggcgataccggcaccggccggcaccttgccggtggtgctgggctcgggttggtctggcgtgttgctccacgaagccgtgggccatggcctggaaggcgatttcaaccgcaagggcagttccgcctatagcgggcgcatgggcgaaatggttgcgtccaagctgtgcaccattgtcgatgacggcaccctggctggccgccgtggttcgctgagtgtcgatgacgaaggtacgccgaccgaatgcaccaccctgatcgagaacggcgtgctcaagggctacatgcaagacaagctcaacgcccgcctgatgggcgtggcgcgcaccggtaatggtcgccgtgaatcctatgcgcacctgccaatgccgcgtatgaccaacacctacatgctcggtggccaaagcgatccggcagaaatcattgcctcggtcaaacgcggtatctactgcgccaacctcggcggcggccaggttgatatcaccagcggcaagttcgtgttctccaccagcgaggcgtacctgatcgaagacggcaagattaccgcgccggtcaaaggggcgacgttgattggtaacgggccggaagccatgagcaaagtgtcgatggtcggtaacgacctgtcgctggacagcggcgtgggcacgtgcggcaaggatgggcagtcggtgccggtaggtgtcggccagccaaccttgaaaattgatgcgattaccgtgggtggcacgggatcgtaggaaccggagcttcgggtggcgaagaccgccacccggggaagaggatcagcgcaggccgcgttgagtctcgtccagctcacggatgtacttgaagattttacggctggtggctggcgccttgttatgcgccagctcgtgctgagcctgacggatcagggagcgcaattgctggcggtccgcgtccgggtagtccagtacgaatttctccagcaccgcgtcatcgcccgagatcaggcggtcacgccaacgttccaggttgtggaagcgttcgttgtactggcgagtggaggcatcggtttgatcgagcaaagtcagaatggcgtcaatgtcttgatcgcgcatcagtttgccgataaacgagatgtgccgtttacgcgcgatattcgcggtgtgcttgggcgcatccgccagggcccgacgcatttcgtcggtcagtggcagtttggcaaccaaatcctttttgagcgttgtaaggcgctcgccaaggtcaaccagagcatgcagctcgcgtttgacctgggttttgcttttctccccatcgagggagtcgtcgtaagaatcaaccatggtggcagtccgcaaagaaacgccgccatgataaccagtcgggggccgcttgtccggcccggtcgctcgatggccattaccgaaagcagaatttgagtggagaaaaccatgagtgcagcccaaagcgtcggtccacaagcgttaccggcactgcaggaacaagtcgagcagatccttgccgaagccaagcgccaaggggccagcgcctgtgaagtggcggtgtcgctggagcaaggcttgtcgacttcggtgcgccagcgggaagtggaaacggtcgaattcaatcgtgaccaagggtttggcattaccttgtacgcgggccagcgaaaaggctcggccagcacttccgccagtggccctgaggcgattcgcgagaccgtcgccgcggcactggcgattgccaagcacacgtccgaggatgaaagctcgggcctggccgacaaagcgctgatggccaaggaagtgcaggatttcgacctgttccatgcctgggatattacccctgagcaagccatcgagctggcgctgacctgcgaagcggcagccttcgatgccgatgcccgcatcaagaatgcggacggcaccaccttgagcacccatcagggttgtcgcgtctacggcaacagccatggctttatcggtggttatgcctccacgcgtcacagcctcagttgcgtgatgattgccgaagccaacgggcagatgcagcgtgattactggtacgacgtaaaccgccaaggcgatttactggcagaccctgcaagcattggccagcgtgcggcgcaacgggctgcgagccgcctgggcgcgcgcccggtgccgacctgcgaagtgcctgtgctgttttccgcagagttggccggtggtttattcggcagcttcctgggggcgatttccggaggcaacctgtatcgcaagtcttcgttcctggaaggcgccatcggccagaagctgtttcctgagtggctgaccatcgacgagcgcccgcatttgatgcgcgtcatgggcagttcgtcgttcgacggcgatggcttggcgacctatgccaagccgtttgtcgagaaaggtgagctggtgtcttatgtgctgggcacttatgccggtcgcaagttgggcctgcccagtaccgccaacgcgggcggcgttcataacctgttcgtgacccatggcgatgaagaccaggccgcgttgttgcggcgtatggggcgtgggttgctggtgactgaattgatgggccatggcctgaacatggtcaccggtgactactcgcgcggtgcggcgggcttctgggtggagaacggcgaaattcagttcgccgtccaggaagtgaccatcgccggcaatatgcgcgatatgttcaagcagatcgttgccgtgggtaacgacctggaactgcgcagcaatatccgtacgggttcggtgctgatcgaacgcatgacggtcgctggcagctaatcctccagcacgtcctcaaaaggcgcgccatcgcaagatggcgcgccttttttattgcagctcttttcgcaggatcaataggccactcttgttttgattctcaatatcatttaataataaatatcattaccgagtgagtgtggctcatgagttctgtcctgcatgaggatccctatctggaaagctggcgttggatgagccgccagattcgctgtggcctggatcccaatgaaccccgcctgatcgagcattacctgaacgaaggtcggtacttggcgtgttgcaccgcaacccatccgtggacgatcgccgaaacctcattccgcttgctgatcgacaccgccgctgatgtcgccttgccctggcattggcgctccctgtgcctggaccaggcctggcggccactgcgcgacctggaaaaactctcccactgtgcctgccgcctcaagcgctggcagacctttgcctggcaattggcgagctgcgaattactgccttcgatttccgtttctgacttggtgcaaggatctaatgatgagtaacacccgtatcgaacgcgacagcatgggcgaactgcatgtgccgcaagaagctttgtatggcgcacaaacacagcgtgcggtgaacaactttccgatcagtcatcaacccatgccggcgcaattcatccgcgccctgatcctggccaagaccgccgccgcgaaggtcaacgtcgacctcaagcaaatcagcgaagggcagggcaaggccattgtcgatgccgcccaaggcctgctggaaggcgactacatgcaacacttcccggtggatatcttccagaccggctccggcaccagctccaacatgaacgccaatgaagtgatcgcgacgcttgccagccgtttgctgggcgaggcggttaaccccaacgatcatgtgaattgcggccagagcagcaacgacatcatccccaccaccatccacgtcagtgccgcgttggtgctgcatgagcaaacgctgccggccctgctgcatctggtgcaggtcatcgagcaaaaagccgaggcagttcacccgttcatcaagaccggccgcacgcatttgatggacgccatgccggtgcgcatgagccaggtgctcaacggctgggcgcagcagctcaaggccaatatcggccacttgcaggacctgctgccggcgctgcaagcactggcacagggcggcacggcggtcggtaccgggatcaacgcgcaccccgagtttgccgggcgcttcagccagcaactgagccttttgaccggggtgaagttcacccctggcaagaacctgttcgcgctgattggctcccaggacaccgccgttgcagtctctggccagttgaaagccacggcggtgtcactgatgaagatcgccaatgacctgcgctggatgaactccggcccattggctggcctcggtgaaatcgaactggaggcgctgcagccgggctcgtcgatcatgccgggcaaggtcaacccggtcatcccggaagcgaccgccatggtggctgcccaggtcatcggcaatgacacagtgatcaccgtggccggccaatcgggcaacttcgagctgaatgtgatgctgccgatcattgcccagaacctgctcagcagcctggagttgctggccaatgccagccggttgctggcggacaaggccattgccagcttcaaggtcaacgaacccaagctcaaggaagcgctgtcacgcaatccgatcctggtcaccgcacttaacccgatcatcggctaccagaaagccgctgaaatcgccaagaaggcgtatcagcaaggccgcccggtgatcgaggtcgccctcgaacataccgacctgccgcgcagccaactggaagtcctgctggacccggaaaagctcacggctggcggcgtgtaatcaacgaccctgctttggaggctcaccatggagcactggaaacgcacgatcgaacgggccaatcgctgctttatggcgggtgagctggttgacgctcgcgaggcctatctgcaagccctggccctggcccaagtgttgttcgaacgctgggcggatgctgacgaagcggtggccgcttgcgtcatttcccatcacaacctggcagacctgcacttgcgtctgaaccagcctgaggaaagcgcggaatacctgtgcgctattcatcagcgccttttgcagaccatgcaggacccgcgcctcagcccgtcattgcgcgaggccgcgctgcgccagagcagcaagacctacgtcgagctgctgaatttcatcagcgatcacggcgaatacccacgcactcatcggctactgggcagtgctgcgacgccaacgtccacgtcccactatggagcacattgatatgacctataccttgccggccttgccttacgcctacgacgccctcgagccgcatatcgacgcgcaaaccatggaaattcactacaccaagcaccaccagacctacatcaataacctcaatgctgcggtcgagggcactgagttcgccggctggccggtggagaagctggtgtccagcgtccaaacattgccggagaaattacgcgctgccgtggtcaaccaaggaggcgggcatgcgaaccactcgttgttctgggcagtcatgtcaccgacagggggcggcaaacccgatggcgcgctgggtaaggctatcgacgagcaattgggtggtttcgacagcttcaaggaggcgttcaccaaggcggcgttgacgcgtttcggcagcggctgggcctggttgagcgttacgccgcagaaaacgctggtggtggaaagcagcggcaaccaggacagcccgctgatgagcggcaatacacccatcctcggtctggacgtctgggaacacgcttactacctgcaatatcaaaaccgacgacccgagtacatcaatgccttttacagcgtcatcaactggccggaagttgccgcgcgctatcaggcggccttggcctgacactcactccataacaagatctaaggccgactatgggcactcaaacactggcgatcggtagcgtacgaatgtttcgttatgcgtttggcacgctgctgctattggcaggtactgcgttattggtggcccatgggctggcctggttgaacctggaaccgcgcattctgcgtgctttgcagggcggggcgatctgcgcgctcggcaccgcgctgggggcggtgccggtgttggtgattcggcgcatgccgatggcgctgagcgataccctgctgggctttggggctggtgtgatgctggcggcgaccgcgttttccctggtcgtgccgggtatcgcggctgctgaaagcctggggctgtcaccctggggcgccggtggcctgatcagcttcggcatcatgctcggagcgttcggcctgtacctggtggaccgcaaggtctctggcgccagcccggaaatgctggtgggtacagcggataagccggttatcccgccgcgtatttggttattcgtgtttgccatcattgcgcacaacattcctgaaggcatggctgtgggtgtttcggcgggcggaggcatgacggatgccgacagcctcgccatgggcattgccctgcaggatgtccccgaagggctggtgattgcgttggtattggcgggagcgggaatgtcgcgggtcaaggccttcctgattggcgctgcatcgggcttggttgaaccggtatttgcggtgctctgcgcatggctggtgagccttgccgaagtgctattgccgttgggtttggcgctggccgccggggcaatgttgctggtggtgactcatgaagtcatccccgaatcgcgccgcaatggccatgaaaagctcgccagccttgggctatgcctcgggttttgcctgatgatggtgatggatacggcgttgggctgaggatggctttatctatgtaggagcgagcttgctcgcgaagaacgcaagagcaccgcgttaaacaacgatgcccgcgttatcgttgacgtttttcgcgagcaagttcgctcctacagtaggggttactcgccttcgtcgaagtagttgttgatcaactcgaccagcgcggccattgcttcgtcttcttgctcaccttcggtgctcaggtggatcttggtgcctttcccggccgccaacatcatcatcgccatgatgctcttgccatcgaccatggactctggcgtacgcccagcacggatctggcaggggaactgcccggccacgccgacgaatttagccgacgcccgggcgtgcaggcccagcttgttgatgatttcaatttccagagcaggcatcgcgcaggtgttcctttcaactcaggtcgcggtggcgaacctggacgttcttgagggtttgttgcagcacctggcccagccgttcagtcaaatagaccgagcggtggtggccgccggtgcagccaatggcaatggtgacataggcccgattgctggcggcaaagcgcggcaaccatttgagcaggtagctggagatatcctggaacatctcttctacgtcgggttgcgcggccaggtagtcgaccacaggctgatccagcccggactgatcgcgtaattccggcttccagtaagggttgggcaggcagcgcacgtcgaagaccaggtcggcatcgaccggcatgccacgcttgaagccaaacgactcgaccagaaacgccgtccccggctcaggctggttcagcaggcgcagcttgatcgcatcgcgcaactgatacaggttcaggttggtggtgttgatcttcaggtcggccaggtcaatgatcggccccagcagtttggtctcgtcctcgatggcttcggccagagagcggttggcactgctgagggggtggcgtcgacgggtttcggagaaccgcttgagcagggtttcttcgtcggcatccaggtacagcacatcgcaatgaatgtgcttgacacgcacttcttccagcagttccgggaaccgcgagaggtggctgggcaggttgcgcgcatcaatcgagacagccacaagtggctgtgccaattcggtatggatcaatgcacgttccgccagctctggcagcaggccggctggcaggttgtcgatgcaatagaagccgttgtcctcaagcacattgagggcggtgctcttacccgagccggagcgaccgctgacgatgatcaaacgcatgattactgcccgttttgttcatccaggacaacttggtacaacgcttcattgctggaggcgctgcgcagtttgtcgcgtacatccttgcggtccagcatgctggcgatctgccggagcagttccaggtgcgcatcggtggcggcttgcgggaccagcagaacgaacagcaggtcaaccggggcaccgtcgatggcgtcgaagtcgatgggtttttccaagtgcagcagagcgctgaccggggtatcgcagccttcgagacggcagtgaggaatggcgatgccgttgccaaaaccggtcgagccgagtttttcacgggcgatcagggcttcgaaaacatcttgcatctccagctcaggcacttggctgctgatcaggttggcaatttgttcgagggcgcgctttttactgccgcccggcacgttcacgagcgaacggccgggggtcaggatggtttcaagtcggatcatggggggagagttaacgacctgtaccttgcatcaggtgcagattcttttccttatgctttatgagttggcggtcgagcttgtcgtagagcgagtcgattgccgcgtacatatcttcatgttccgcattggcgacgagcttggcattcggtacgtgcagggtggcctcgattttctgcttgagcttatcgacctccatgatgacctgcacgttggtgatcttgtcaaaatgccccgcaagcttgttcagtttgctctcggtgtattcacgcaggggcttggtgacttccagctggtgtccactgatgttgacttgcatacagcttctccttcgttgccagtgcataaagcggtgggcaggaatacccaccactggaacgctgtggcccgcccgtcacatcaaacgcttacgctcgctggaaggcgcgatccctagggactcgcggtacttggcgacggttcgacgggcgacctgaatgccttgtgcctccagtaaaccagcgatcttgctgtcactcaacggctttttctgattttccgcggcaaccagttttttgatgatcgcgcggatcgccgtggacgagcattcgccgccttcggaggtgctgacgtggctggagaaaaagtatttcagctcataaataccccgtggggtatgcatgaatttctgcgtggtgacccgggaaatcgtcgattcgtgcataccgacggcttcggcgatgtcgtgcagcaccagaggcttcatggcctcgtcgccgtattccaggaaaccgcgctggtgctcgacgatctgggtcgcgactttcatcagggtttcgttgcggctttgcaggctcttgatgaaccaccgcgcttcctgcaactggttgcgcatgaaggtgttatcggcgctggtgtcagcgcggcgcacaaaaccggcgtactgcgggttgacccgcagacgcggtaccgactcctggttcagctccaccagccagcgttcgttgtccttgcgcacgatgacgtcggggaccacgtattcggcttcgctggattcgatctgcgagcccggacgcgggttgaggctttgcaccagctcgatgacctggcgcaagtcatcttccttgagcttcatgcggcgcatcagttggctgtagtcgcgactgcccaacaggtcgatgtagtcactgaccagccgttgcgcttcggtgagccatggcgtcttggccggcagttggcgcagttgcagcaacaggcactcgctgagcgtgcgggcaccaatgccggcgggttcgaattgctggatgcggtgcaggacggcttcgatttcgtccagttcgatgtccagttccgggtcgaaggcctcgaggatctcgtcgagggtttcgtccaggtagccctggttgttgatgcagtcgatcagggtgaccgcgatcaggcgatcggtatcggacatcggcgccaggttcagttgccacaacaagtggctctgcaggctctcgcccaccgacgtacgggtggtgaagtcccactcgtcgtcatcgttgctcggcaggctgctggcgctggtctggtagacgtcttcccatgcggtgtccacgggaagctcgttgggaatgcgttcattccagtcgccttcctccaggttgtccaccgtcggggcggtttcctgataggagggttcctgcacgtcgggattgggtttttgctcgatgttgtcggccagcggatctgcgttgtcgaagtcgtcgccttcttcctggcgttcgagcatcggattggactccaaggcctcctggatttcctgttgcaggtccagggtcgacaattggagcaggcggatggcctgttgcagctgcggtgtcatcgtcagctgctggcccattctcaggactagcgatggtttcatggcaggggcttaacaccttattcgccggcgcaatgcgccatccacgacagggcgcgtgagcgccaaacataagcaaattatatgcctgatctcggggcctttgcctagagcgcggtaacaataaaaaaaccgaggtttctattgactcccgcgcgctcaagggaaaagcgcgatacccctgtgtttacaggcggaactcgtgacccaggtacacttccttcaccagctcgttagccaggatcgtctcggcatcgccttcggcaatcagctgaccatcgttgacgatataagcggtttcgcagatatccagggtctcgcgtacgttgtggtccgtgatcagcaccccaatgcccttggccttgaggtgatggatgatctgcttgatgtcacccaccgaaatcgggtcgacaccggcgaagggttcatccagcaggatgaatttcggcgcagtcgccagggcgcgagcgatttccacgcggcgacgctcaccaccggacaagctcatgccgaggttgtcgcgaatgtggttgatgtggaattcctgcaacaggctttccagctcctggcggcggccatcgcgatcaagttccttgcgggtctcgaggatcgccatgatgttgtcggctaccgacagtttgcggaagatcgacgcttcctggggaagatagccgatacctgcccgtgcacggccgtgcatgggttggtggctgacgtccaggtcgtcgatcaatacacgaccctggtctgcctggaccagcccgacgatcatatagaagcaggtggttttgccggcaccgttagggcctagcaggccgacgatctggccgctgtcgatcgacaggctgacgtcgcgtaccacctggcggcttttataggccttggccagatgctgggctttcagggttgccattactcggccttcttcttcggctggataaccatgtcgatgcgtgggcggggtgcggtgaccttgttgccgttggcgcgaccggcgttagcgatctgcttcacggtgtcataggtgattttttcaccttccgtggagttgccgtccgggctcagcaccttggcctggtcaatcagtacgatgcgattctgctgggcgtgatactggatggtcttgccgtagcccttcatcgggccggtgtcggtggcggactgcttctgctcgaaataagccaggttgcccaccgacgtcaccacgtcaatgtcgcctgcgggggtgcgcgtcagagtcaccgtgttaccggtaatcttcatcgagccctgggtgatgatcacgccgccggtataggtggcgacacctttcttgtcatcgagctgtgcatcgtcagccgaaatatggatcggttgctggctatcgttcggcagagcccaggcgctcacgcttcccagtgctgcgcccagaccgagcaaaatagggagggttttaacgagcctcatactgtcctcttacgttcgatagcaggtgtatcctgctttctttcaaatacgctttcattcccttgccagtcgatacaccgccagcgccgtcgattctaacgtcttgctcggtctgcgcatattgcttctgtgggaatacggtcatgcgactgctggtaatgatggtgtcgcggttctgcgcgtctgtacgtgcgacgcgaaccgagtcgatcagttcaacttcggtgccgtccgcgttcacttcgccacgcttgctggtgacgtgccagggaaattcggtgccgcgatacaggttcaggtccggattggtcagcaggctaacgtcggctaccttcaagtgttcgaccttgtccgacgtcaattcatactgcaccttgccgtcgggcaggtactgaatgctgtaggcattggtggcgtaatagtcgataaggccttcgtcaacctgcgcaacaggcttgtcgagaaagcgctccgggctgatattccagtagcccaccgccaggagcagcgcggcgatgaccccgaataacaggaagttgcgaatctttttgctcagcatataacgctctataggtaggcggcgtgggccgcttcaagactgccctgggcacgcaggatcaactcgcagaactcgcgggcggcaccttcgccgccacgggcggtggtgatgccatgggcgtgttcgcgcacaaacgctgcggcattcgcgacggccatgcccaggcccacccggcgaatcaccggcaggtctggcaggtcgtcgcccagataggcgacctgttcatagcttaggttgagttggccaagaagctcgtccagcaccaccagtttatcctcgcggccctgatacaggtgaggaataccgaggttttgtgcgcggcgttccacaaccggtgtttttcgaccgctgataattgcggtttgcacgcccgctgccatcagcatcttgatgccttggccgtcgagggtgttgaaggtcttgaattcgctgccgtcttcgaggaagtacaggcggccatccgtcagcacgccgtcaacgtcgaaaatcgccagtttgatgtttttaccgcgttgcatcaggtcgctggtcatttacatcactcctgcgcgcagcaagtcgccaaggttaagggccccgatcggccgatcatcgtggtcgaccacgatcagtgcgcctatccggtggtcctccatgatcttcaacgcttcagccgcgagcatttcggcgcgcgcggtcttgccgtgaggggtcatcacggcgtcgatggtggcggtgtggatatcaatggtgcggtccagggtgcgacgcaggtcgccgtcggtgaagatccccgccagccgaccatcggtctcgacgatggcggtcatgcccaagcccttgcgggtcatttccatcagcgcatcccgcagcagggtgccgcgtggaacgctcggcaattctgtgccgctgtgcatcacattttccactttcagcaacaggcgacggcccagtgcaccaccgggatgggaaaacgcgaagtcttcagcggtaaacccgcgagcctccagcagtgccaccgccagggcatcgcccatcaccagtgcggcggtggtggaggaggtgggcgccaggttcagcgggcaggcctcgtgggccacgtgcacgttcaggttgacgtcggcggccttggccagcgttgactcagggttgcctgtgaggctgatcatctggatgcccaggcgcttgatcagcggcaacagggtcacgatttcgttggtggtgccggagttggacagcgccaaaatcacgtcatccttggtgatcatgcccatgtcgccgtggctggcttcggccgggtgcacgaaaaacgccgtggtcccggtgctcgccaaggtcgcggcgatcttgttgccaatgtggccggacttgcccatgccgaccaccacaacgcggcccttgctggccagaatcatctcgcaggcgcgcacgaaatccgcgtcgatatgcgccagcaagccttctacggcttcaagctcaaggcgtatggtgcgttgtgcggattgaataaggtcgctggattggctcatgtctgaaatcgtatagcctgacgaaaagtcggcgattatagcggtaatgatcgattccctcacgcaagttcgtcaggctttgtgcgcgggataactgaaaagcaccttcggtaacatagcaagcaacgtttttccctgtctcaaatctgaaccagcgctgttccggccttgggcgctctgtaccagcagtgatatagttcgccgccagttcggtccgcccaacccatgtgccttactattgcgcatcagttgaaaaccaaagtcgcacacatggtgtctgagtgaaaggctgcatcccaaggagattagatgagtgccgataacgcctacgcggtcgagctgaagggtcttaccttcaagcgcgggacgcgcagcatcttcaataacgtcgatattcgcattcctcgcggcaaggtcacgggcatcatggggccttccggttgcggcaagaccaccctgttgcgcctgatgggcatgcaattgcgccccagtgccggggaagtgtgggtcaacggccagaacctgccgacgctgtcgcgtagcgatctgttcgatgcgcgcaagcacatgggcgtgctgttccagagcggcgcgctgttcaccgacctcgatgtgttcgaaaacgtggccttcccgctgcgggtgcacacccagctgtccgacgagatgattcgtgacatcgtgttgctgaaactgcaggccgtgggccttcgcggtgccatcgacctgatgccggacgagttgtccggcggcatgaagcgccgtgtcgccctggcacgggccatcgccctcgacccacagatcctcatgtacgacgagccattcgtgggccaggacccgatcgccatgggcgtgttggtgcgcctgatccgcctgctcaacgatgcactggggatcaccagtatcgtggtgtcccacgacctggccgaaaccgcgagcattgccgactacctgtatgtagtaggtgatggtcaggtgctggggcagggtacgcctgaagagttgatgaatgccgataacccgcgtattcgccaattcatgaccggcaaccccgatggcccggtgccttttcactttccggcagcggactaccgctcagatcttctggggaagcgctgatgcgcaagacatctcttatcgagaaggttcgccttttcggtcgctcgggcatcgacatcgtcgaagtgctggggcgttcgaccattttcctgttccacgccttgctggggcgcggcggcatcggcggcggctttggcctgctggtcaagcagctgcactcggtgggggtgatgtccctggtgatcatcgtggtctccggcgtgttcatcggcatggtgctggcgctgcagggtttcaatatcctgtccagctacggctcggagcaggcggtagggcagatggtggccctgactctgttgcgtgagcttggccccgtggtcaccgccttgttgttcgcggggcgtgcaggttcggcgctgactgctgaaatcggcaatatgaagtccaccgagcagctgtccagcctggaaatgatcggcgtggacccgctcaagtacattgttgccccgcgcctgtgggccggcttcatttccctgccgttgctggcgatgatcttcagcgtggtgggtatctggggcggttcgtgggtggcggttgactggctgggggtctacgacggctcctactgggccaacatgcaaaacagcgtgaccttcaccggtgacgtgctcaacggcatcataaagagcattgtctttgcctttgtggtgacctggattgccgtattccaaggctatgactgcgagcccacttcagaggggatcagccgtgccactaccaagaccgttgtgtacgcctcgctggcggtactgggccttgacttcattttgaccgccttgatgtttggagatttctgatgcaaaaccgcactgtggaaatcggtgtcggccttttcttgctggctggcatcctggctttactgttgttggccctgcgagtcagcggcctttcggccagccctaccgccgatacctataaactttacgcgtacttcgacaatatcgccggtttgacggtcagatccaaagtgaccatggccggtgtcaccatcggcaaggtcacggcaatcgatctggaccgcgacagctttaccggtcgggtgacgatgcaactggacaagaaggtggataatctgccgactgactccacagcatctatcctcactgcggggttgctgggcgagaagtacatcggtgtcagcgtgggcggggaaacagccctgctcaaggatggttcgaccatccacgacacacagtcgtcgctggtgcttgaagacctgatcggaaaatttttgctcaatacggtcaataaagacgccaaatgaggaatctgttcatgatctctaccttgcgacgtggcctgctggtactgcttgcagcattgccgataatggccaacgcggcaggttctgcccacgatttggtgcaggacactaccagcagaatgctggctgacctcaaggctaacaaagaacagtacaagcaagacccttccaagttttacaacgcgctcaacacgatcgttggccctgtggtcgatgctgaaggtatttccaaaagcatcatgacggtcaagtattcgcgcaaggctacgcctgcgcagatgcagacgttccaggaaaacttcaagaagggcctgttccagttctacggtaacgctctgctggaatacaacaaccagggcattgtcgttgatgcgcccaaggacgagtcgggcgaccgtgctgaagtcgggatgaaagtctccggcagcaatggcgccgtgtacccagtgtcctacaccctgacgaagatcaacggcgagtggaaactgcgcaacgtgatcatcaacggtatcaacatcggcaagctgttccgtgatcagttcgccgacgcaatgcagcgcaatggcaacgacctggacaagaccatcaatggttgggccggtgaagtggccaaggccaaggaagaaaccgacaaagctgccgggaagcctgcgcaatgaccgagtcggctgttcgtatcggcgatgccggcgagctgttcctcagcggcgtgctggattaccgcaccgggcctgacctgcgcaagcagggccaggcgctgatcaaggccagcaaggcgccagaactggtgctcgattgctcggcggtgaccaagtccagcagtgttggcctgtcgttgttgctgtgcttcatgcgtgatgccgaggcggcgaaaaaaccggtcagcatccgtgcgttgccagaagacatgcgcgaaattgccgaagtttccggtttgaccgagcttttggcgcatccttaatacacattattaaagaagccccccgtcagagtcctgctatgcggggttcgcaggcgcggggcttttttgtatgatgtgcgacccgtgcgcactgggcgccgatagaggttgagcatgcaggccctagaagttaagagcttccttgaaggaaagctgccggaaacgactgtagaagttgaaggcgaaggctgcaatttccagctgaacgtgattagcgatgaactggcggcattgagcccggtcaagcgtcagcagcagatctatgcccatttgaacccatggatcaccgatggcagcatccatgcggtcactatgaaatttttcagccgcgcggcctgggccgagcgcacctgagcccccaaggcgtcgagattcttatggataaattgattattaccggcggtgcccgccttgatggcgagatccgcatttccggtgcgaaaaactccgccttgccgatcctggcagcgaccctgctgtgcgatggcccggtgactgtggccaacctgccgcacctgcacgacatcaccaccatgatcgaactgttcggtcgcatgggcattgagccggtgatcgacgagaagctggcggtcgaaatcgacccgcgcaccatcaagaccttgatcgccccgtacgaactggtgaaaaccatgcgtgcgtcgatcctggtgctgggcccgatggttgcccgtttcggcgaagccgaagtggccttgcctggcggttgcgccattggttcgcgtccggtcgacctgcacatccgtggccttgaggccatgggcgcagtcatcgacgtcgaaggcggctacatcaaggccaaggcgccggaaggcggcctgcgtggcgcgaacttcttcttcgataccgtcagcgtcaccggtaccgagaacattatgatggccgctgccctggccaaaggccgcagcgtgctgcaaaacgccgcgcgtgagccggaagtggtcgacctggccaacttcctcaacgccatgggcgccaaagtttccggcgctggcaccgacaccatcactattgatggtgtagagcgtctgcacaccgccacttacaaagtcatgcctgaccgcatcgagaccggcacctacctggttgccgctgccgtgaccggtggccgcgtgaaggtcaaggacaccgatccgaccatccttgaagccgtactggaaaaactcaaggaagccggcgcagagatcaccactggcgaagactggatcgagctgaacatgcacggcaagcggccaaaagctgtcaacgtgcgtactgctccgtatccggcgttcccgaccgacatgcaagcgcagttcatctccctgaacgcaattgccgaaggcaccggtgccgtgatcgagaccatcttcgaaaaccgtttcatgcacgtgtatgaactgcaccgcatgggcgccaagatccaggtcgaaggcaacaccgctatcgtcaccggcatcgacaagctcaagggcgcgccagtcatggccaccgacctgcgtgcttcggccagcctggtaatctcggcactgtgcgccgaaggcgacaccctgatcgaccgcatctaccacatagaccgtggttatgagtgcatcgaagagaaactgcagatgctcggcgcaaaaatccgccgcgtaccgggctaacccccactgcactgtaggatgtaggagcgagcttgctcgcgaagaactcatggtcaccgcgtgaagtctgaataaacgcgttatcgttgacgttcttcgcgagcaagctggctccgacaaacactggtttgtttcaaatcgaggctgtcatggcctcgatctgtgtctggcgccgtttgtgaccggacagcaatagcctgatgaaggactgacatttcccatgttgaccatcgcactgtccaagggccgcatccttgacgacacgttgccgcttctggctgaagcgggcatcgtgccgaccgagaatccggacaagagccgcaagctgatcatccccacgacccaggacgacgtgcgcctgctgatcgtgcgggctaccgacgtgccgacctacgttgaacatggcgccgccgacctgggtgttgccggcaaggacgtgctgatggaatacggcggccagggcctgtacgagcccctggacctgcgcatcgccctgtgcaaactgatgaccgccggccgcgtcggtgacgtcgagcccaagggccgcctgcgggtcgccaccaagttcgtcaacgttgccaagcgctactacgccgaacaaggtcgtcaggtcgatatcatcaagctctacggctccatggagctggcaccgctgatcggcctggccgacaagatcatcgacgtggtcgacaccggcaacaccctgcgtgccaacggtctggaaccccaggatttcatcgctgacatcagctcccgcctgatcgtcaacaaggcatcgatgaagatgcagcacgcccgtatccaggcgttgatcgacaccctgcgcaaggcagtggagtctcgacaccgcggttgactcacccgcgtagctgaagagctgcgcccgtctatccgcctcatagccagaattctcaggtgcccaagcggaaacgactgctagtttagggcgcctgagtttttgccaattctattgaggccctcgctatgaccacgtccactgcaattgcccgactcaacgctgccgacccggatttcgcccatcatctggatcatctgctgagctgggaaagcgtgtctgacgactcggtcaaccagcgggtgctcgacatcatcaaggccgtgcgcgaacgcggtgatgcggcgctggtggacttcacccgccagttcgacggcttggacgtaaagtccatggccgacctgatcctgccgcgtgaacgcctggagctggcgctgacgcgcatcaccgcgccacagcgcgaagccctggaagtcgcagcggcgcgggtacgcagctaccacgaaaaacagaagcaggactcctggagctacaccgaggccgacggcacggtgctgggccagaaggtcacgccactggaccgcgccggcctgtacgtgccgggcggtaaagcgtcgtatccatcgtcggtgttgatgaatgccatcccggccaaagtcgccggcgtgaccgaagtggtcatggtggttccgaccccgcgtggcgaaatcaatgagctggtgctggctgccgcctgcatcgccggcgtcgaccgcgtgttcaccatcggtggcgcccaggccgttgcagcactggcctatggcaccgaaagcgtgccgaaggtcgacaaggtggttggccctggcaatatctacgtcgccaccgccaagcgccatgtctttggccaggtcggtattgacatgatcgccggcccctcggaaatccttgtggtgtgtgacggccagaccgacccggactggatcgccatggacctgttctcccaggcggagcacgatgaagacgcccaggcgatcctggtcagccccgatgccgagttcctcgacaaggtcgccgccagcatcaataaactgctgccgaccatggagcgtgccgagatcatcgagaagtcgatcaacggccgtggtgcgctgattctggtgcgtgacatggagcaggccatcgaagtggccaaccgcatcgcaccggagcatcttgagctgtccgtagcggacccacaggcctggttgccgtcgatccgtcacgccggggcgatcttcatgggccgccacaccagcgaagccctgggcgactactgcgccggccctaaccacgtgttgccgacctccggcactgcacgtttctcgtcgccgctgggggtgtacgacttccagaagcgctcgtcgattatcttctgctcgccacaaggcgcttccgagctgggcaagaccgcctcggtgctggcccgtggtgaatccctcagcgcgcacgcacgcagcgctgaataccgcatcgtcaagggagagtaaggcatgagcaaattctggagccctttcgtcaaggacctggtgccttacgtgcccggtgagcaaccgaagctgaccaagctggtcaagctcaacaccaatgaaaacccctacggcccatcgcccaaggcgctggcggcaatgcaggccgagttgaacgacaacttgcgcctgtacccggaccccaacagcgacctgctcaagcaggccgtggccaggtattacgggatcgacgccggcaaggtgttcctcggcaacggttccgatgaagtcctggcgcacatcttccacggcctgttccagcacgatctgccgttgctgttcccggatatcagctacagcttctacccggtgtactgcggcctgtacggcatcacgttcgacgcggtggcattggacgagcagttccagattcgcgtcgctgactacgccaggcccaacggcgggattatcttccccaacccgaacgcgcccaccggctgcgtactggcgctggacgcggtagagcagatcctcaaggccagcccagattcggtggtggtggtcgacgaggcctatatcgacttcggtggcgaaaccgccatcagcctggtggaccgttacccgaacctgctggtgacccagaccctgtccaaatcgcgctcactggccggtttgcgtgtgggcctggccgtgggccacccagacctgatcgaggcgctggagcgggtcaagaacagcttcaactcctacccattggatcggttggcgattgttggcgcggcggccgcgtttgacgaccgtgaatacttcgagaagaccactcagtgggtgatcgacagccgcaaccaggtcgtcgcgcaattagagagcaaggggtttgaggtgttgccgtcggcggcgaacttcatcttcgcgcgtcacccgcggcatgacgctgcagggctagccgccaagttgcgtgagcaaggggtgattgtgcggcacttcaagcaggagcggattgcccagttcctgcggatcagcatcgggacgccggagcagaaccaggcgctgatcgacgggctcggcaagctctaattctttacaggctgtaagggcctcatcgcggggaagcccggctcccacaggaaaacgcatttccctgtgggagccgggcttgcccgcgatgaggccatcagctacaccagaaaactggaaggcttagatcaacggctcatccggcttcttgttcttccagccatcattgcccggcagcagcaagttcaagccaatcgctaccaccgcacacagggcaatgcccttgaggccgaaatcatccgggccgttgccggtacccaccagcacaccgccaatcccgaacaccagggtgaccgacacaatcaccaggttgcgcgcctcgcccaggtcgatcttgtggcgaatcagcgtgttcatccccaccgcagcaatcgagccgaacagcaggcacagaatcccgcccatcaccggcaccgggatgctctgcagcagcgcgccgaacttgccgatgaacgccaggctgatggcaaacactgccgcccaggtcatgattttcgggttgtagttcttggtcagcatcacggcgccggtcacttcggcgtaggtggtgttcggcgggccgccaaacatgccggcagccgtggtggcgataccgtcacccagcagcgtgcgatgcaggccaggctttttcaggtaatcgcggccggtcacgctgcctaccgcaatcacacccccgatatgctcgatcgccggggccagggccaccgggacgataaacaggatcgcctgccagttgaactccggcgcggtgaagtggggcagggcgaaccacggtgcggcggcgatcttagccgtgtcgaccacaccaaagtagaacgacatggcaaagcccaccagcacgccggagatgatcggcaccaggcggaaaatgcccttgccgaacacggccacgatcaaagtggtgagcagtgctggcatcgagatcagcatcgccgtttggtaatggatcaactcggcaccgtcgccggacttgcccatggccatgttggcggcaatcggcgccatggccaggccgatcgagatgatcaccgggccgatgaccacgggcggcagcagccggtcgataaaaccggtgcccttgaccttcacggccaggcccaggaacgtatagacgaaacccgccgccatcacgccgcccatggtcgccgccaggccgaactggcccttggcgagaatgatcggagtgatgaacgcgaagctcgatgccagaaacaccggcacctgccgccctgtcaccacctggaacagcaatgtgcccaggcctgcggtaaacagcgcgacgtttggatcaagacctgtgatcagcggcatcaacaccaacgcgccaaatgctacgaagagcatttgtgcgccagacaggatctggcgccaaagcgggtcgttgaattcatcctgcatgctcacgcgtccttctgcttggtgccgaagatcttgtcaccggcatcgcccaggcccgggatgatgtagccgtgttcgttcaggcgctcatcgatggacgcggtgtagatctgtacatccgggtgggccttctcgacggcggcgatgccctcgggcgcggccaccagcaccatggcgcggatgtcccggcaaccggcttttttcagcaggtcgatggtggcaaccatggaactgccggtggcgagcatcgggtcgatgatcatggccaggcgttcgttgatttccgggacgagtttttccaggtaggtgtgggcctgcagtgtttcttcattgcgggccacgcccacggcgctgaccttggcgcccggaatcaggctgagtacaccttcaagcatgccgataccggcgcgcaggatagggacgacggtaattttcttaccggcgattttctccacctgtacggggccggcccaaccggggatctcgtaggtttccaagggcaaatccttggtggcttcgtaagtgagcaacgctccgacttcctgagcaagctcacggaagttcttcgtgctaatgtcggcacggcgcataaggccgagtttgtgtcggatcagcgggtggcggatctcgcgagtgggcataggaaaggctccggcggcgggcaaaaaaaccggcctagattaatctatccgagggtgttgtcctatagacatcaagtacgttagtccataaaggcttgattggagcgcacgagaagcgtaccttcgcccgcttttcttgccacagcacccccttggagagcgccatgtctgctgatctcgagcatatccgtcaaatcatgcacgaggctgactgcctgtacaccgaagcgcaagtcgaagcagcgatcgccaaggtcggcgcgcacatcacccgcgaaatggccgacaccaacccggtggttttctgcgtgatgaacggtggcctgatcttcgccggtaaattgctcactcacctgcagttcccgctggaagcctcttacctgcacgccacccgctatcgcaatgagaccagcggtggcgacttgttctggaaggccaagccggaagtgtcgttcatcgaccgcgatgtgctgatcatcgatgacatcctcgatgaaggtcacaccctgggtgcgatcatcgacttctgcaaacatgccggcgcacgcaaagtgcacactgctgtgttgatcgacaaagaccacgaccgcaaggcccgcccagagctgaaagctgactttgtcgggttgccgtgcgtcgaccgttatatcttcgggtatggcatggactacaagggctactggcgtaacgccaatggcatctacgccgttaaaggaatgtaatcgatggcccgctttcttgatcagacgctgtttgccgagttggccgagaaagcggccgccaatccccgtggccgtcaaaacgttaacttccatgagatgcaagagccttgtcatcgcatggcggtgggtttgcagcccagcacctatgtgcagcctcaccgtcacctgagcgccgataaggctgagaccttgctggtgctcaaagggcgtctgggaatcctgattttcagcgagacgggcaaagtgttgagcaagcgtgtgttggaagcgggcggggaatgccagggcgtcgacctgtcgcccggcgtttttcatggcctggtggtgctggagccagacagcatcatgtttgaatgcaaagcaggcccttatcgtcctgttggcgatggcgaactggcaagctgggcgcctcgtgaaggcgaggtggggatggcggagtatcaccgctggatgcttgcccagttcgactgaacactgaaatcgtaggagcgagcttgctcgcgaaaaacgtcaacgataacgcgtgcttcctgaataaacgcggcgcctttgagtttttcgcgagcaagctcgctcctacaggtattagggtaagccccctcccacatccggcgtcgcgcaggtagacttctagccccgtgtaaatgtctgcaggctggagtcggtaatgcgtaaagataagaaacaggtgattggcgacgaaatcggtgacgaccagatcaagttgttcctggacttcgagccggttgatgcgacgtcgccgtccctgcacaaactgatcaaggcctatcgcggcctgcgtatcgacgacttcgagcgtttcctggggttcttcaaggcagcaggcctggacctggatggcaaggatgagcatggccagaccttcgttgacctgatcaaggaccagcgtaacgccgccgaatacatcgagctgatcgacaacgcccgcggctgattatccgagccacaaaaaaacgccccggcctcatgagagaccggggcgtttcgcgctcgttcccacgctctgcgtgggaatgcattctgtgacgctctgcgtcacgacctcacgcgtagctttcagcctcgttgctttgctccaccagctcaaggctgatgttgttctgcgtgttgatcttgcgatacagctcggcgtccgtctccagcactttctcgcgcgccgggaagatctcatgcagcttggtggcccattcaccggcagctttctgcgggaagcaacgctcgatcaactccagcatgatcgagacggtcaccgaggcgcctggggaggcacccaacagcgccgcaagcgaaccgtccttggctgcgaccaactcggtgccgaattgcagcacgccgcctttcttcgggtctttcttgatgatctgcacgcgctggccggccacttccaggcgccagtcttcggctttcgcctcggggtagaagcggcgcagggattccaggcgctgttccatggactggcgcacttcgctgaccaggtatttggtcaggtccatgttgtcgcgggccacggccagcatcgggccgatattgccggcgcgaatcgacatcggcaggtcaaggaacgagccgtgcttgaggaacttggtggtgaagccggcgtatggcccgaacagcagggatttcttgccatccaccacgcgggtgtccaagtgcggcacggacatcggtggcgaacccacggcagcctggctgtagaccttggcctggtgctgcttgaccacttccgggttgtcgcaacgcaaccactggccgctcaccgggaagccgccgaagcctttgctctcttcgatgcccgaggcctgcagcaacggcagcgccgcaccgccagcgccgaggaacacaaacttggcatcgacgtcacggctgttgccgctgttgacgtccttgatgctcacggtccagcctgcgccgttgcgcttgaggccggtcacgcgtttgcagtacttgacctgggcgtccggcgagctggtcaggtggctgagcaactgattggtcagcgcgccaaagttgacgtcggtgccgttcatcacgcgggtggcggcgattttttcgtcgagcgggcggcccggcatcatcagcggcatccactcggccatttcgctgcggtcttcggtgtagtgcatgtccgaaaacgcgtggtgctggctgagggtctcaaagcgcttcttgaggaaggacacgcctttgtcgccctgcacgaagctcaggtgcggcaccgggctgatgaacgacttggacgagccaaaggtgcccttcttggtcaggtaagcccagaactgcttcgacacctcgaactgggtgttgatgtgcacggctttcttgatgtcgatggagccatcggcggcctgcggcgtgtagttcagctcacacagccccgcgtggccggtaccggcgttgttccacgggttggaactctccgcggcacccgaatccatcagctcaacgacttccagcgtgaggccggggtcgagctctttgagcagtacggccagggtggcactcatgatgccggcccctaccagtactacgtcgactgcttcgttatgcgccatttaacgcgtctccaaaatctgcagcaccaaattgtcggcatggctgccaggagtgacggggcggttcacgtgttgccccaggttacccatggccaggatcgccatgtccgattcgcaattctttgcaacttcagcacacgcttcctgccgggctaatgtgcctatgaacgcattcatgggcgcctgtggcaattcgacttatggtcaaagcgtgcgattcgtgcaaccaatccgtagcggacaggctcaagctccggtttttgaggcgtgctcggtcctgtgtaattgggctgttccagacgctgatggtgcttgtacaaacgccaaactattcatttgctcgccacactcttgtgaagttgtgaaaacccgttttttcacgctcttttgaagacgtgaacctcaaaaaagggctgccccagcctggcacctggcccgcaaatctctgccgacacgcggcaaaacgggcaaacaactcaagtggccgagcgcaatggcagctctggcagattcgataaaagacggggtggtttgcaaaggaaacagcaagcacgccagcttcactcgatctgtgtgggcggctctctgtgggcgatttgggggctaatgcctgggcattaacgatgctgcgaggcccgatcaggagacgtccttataatcggggggagattgtagcgaagaacgccagggaaatgggcgtgttttatgacttttattagggcgccggtcaggaggccaacgcttgccggtgccgtgggcgaaaaacctgcgggctgacccgggcgctggcgggcagtgggcggtgcatccagcccaggtgagtctcggtcacttccacccagccttcaccgacgggcggcaggctgcactgcttgaaggccaggcaatgaccgtgggcgtcgagtagggcaaagtggcgatgacgggcgtgcgacatgaacagggtcttgagaaggcgcatggctgtgtacctggtgtgttacatgcttgaaggttgccagtgtggcatgacactggagtgacgaatttatgcgaatttgtaatttgcacagggcttcagccgccgttcaggatcgctggtgagtggcgcgcgtgcaccgttatactggcgacctgtctgcacctagtcctggagaaatgcgatgttgcaacgcctgttgttcggtttgatcactgtgaccagtttgacccttgtcggctgcgccaacagcccgcaacaactcagcccgcaacctaaagtcactgcgccgttggctgcggtaggccacggccagccggtgtcggtgcgcgtggtcgacggtcgcccgtcgccaaccctgggttcacgtggcggcctgtaccctgagaccgcgctgatttcggtgagcggccaggatgtgctgcccaagttgcaggcccaggctgaagctgctgtgcgcttgttgggctttacgccgaccaactcgccaggcgtgccgcaactgaccgtgaccctggccgagctgaaataccagtcgcccaaagacggcctgtacgtgaccgaggcttccatcggcgccaccttcaagtctgacgtcagcgccggtactcgccgctacagtggccgctacgctgcctcgctcaaccagcgtttcggcatgtctcccaaccaggaaaccaacaccaagctggtcagcgacgtgctcagcgatgccttgacccgcctgttcaaggacccaagcatcggtcaactgctcagcgcgcaataagccgcttataaaaaaaaccgggctcatcactgagcccggtttttttgtgcctgtagtttggtcatgccgccgtatcgacataaaagtccagcatgctcacgccggtgagcaagtccagctccggcaggtcggcatgctgatgcccgccgagggcgcaatacaccagccaatggcggtcctgaacgttgaacgcgaggctgccgatcagcgcctcctgttcctcgctctgggcgatcaggtacagccgatcctggttttgcgcatgcaacatgacaagctcctcaagcgtcgaagggcaacagagtggcttgttaaggtgacgttcaggtgacggcgtaaattactggatacattagccgtccatggggaaggagcattaaaggcgcaggaggcgactgtcgttcaggtgtgtatctggactgatacccgaacactggttcaccgaggtttgcgatggcgctgcccgcactgctcattaatattgttgccctgttggttgcctgctcgggcgcctgggtgctgttcatcacccgcctgcatgcacagcgtgcgatggccgacctggccctgcgcagcgaagagcgcgctatcgaccagccgatgctgtttctggatacgcgcaccgaacgggcgcatcgcctggcgtaccgcgtcgggttcgcctgccttggcctggccctggccatctcctggctcagcactcgcttttaaggctactgcaagtcaaatgttggagcgggcttgcccgcgaaggcggtgtatcagccactggatctttaactgaaccaccgctatcgcaggcaagccagctcccacactggccatgtactgcctgcagaatcagcgcctgccacatatcccctgtgggctcactgttacagggggatcccagccttgactcggtattggttgcgtaccggcgtcgcatactgcaccaccaggtaaggccggtgctccgccgggcaatcgttcaagcgccgctcccattccgccttggccttggccagctcatcggccgggaacacgtccgcggccttgggcacctgcagttgcgggtcggcatcactccactgcgcgtacgccaggtagtgcaccgggaacaagcgatagccgcccaggatctgccggtccatttctgccgccagcagcttggtgtcttcaaagcgctcggtgatcggcggcgcaaagttcacgtgcacccggcctttatagccggtaatgcccagggcaatgctcacatcgtcctcgcccggtgccttgctgtaggtaccggtggtggcgcggatatacagctcgcgggccttggcggcatcgcaagggtcgtactcgtagctgatggacaccggcgtcaggttcaacgactggatgacttcggcgaacggctcgtccttgcggctgacgtggaacatcttgaggatcgccgattcggtacgatcatcgccatccttggcccggccttcagcctgggcgatccagatcgactggcagtcgttgcggatcgaatggttgatgtaggccgacagcaggttgtaagccgccatcttctcctttcgcccggtgatcgaacggtgcacgatgaagctcttgttcaggcgcatcaggtcgctgacaaacggcttttgcagcaggttgtcaccgatggcgatgcgtggcgtcggcaggccggcgtggtatacggcatagttgacgaaggccgggtccatcacgatgtcgcggtggttggccagaaacaggtaggcggtaccggatttgagctgctcgacgccggtataggtcacgccgtcggtcgcccggtcgatggtgtggtcgacgtagtactcgactttgtcttgcagcgtggccacggtggtgacgcccgcgaactcgcggcgcagtttgcgcgcgatcatcggcttgagcagccagcccagggcgccggcaaagcgcgggaagcggaagtgggtcaggatgtccagaaaggccttgtcactgaacagacgcgccagcactgccgggacttcgctgtcgttgtaaggtcggatggtatcgaattcgcccatcatgctctcttgttagaaacggctagggtaagtaaaggaaatagcaggggcggcgtgagtaaactggctctgccggaaatagccctgtaaatagaccggcgattatacgcacaagtcaccttggagactgcgatgctggaaactgcgatgtacgattgtccttattgtggcgaagcggtcgagacaacagtggatttgtctggcggggaccagacctatatagaagactgccaagtgtgttgccggccgatcacgttcgacctgcaagttcatggtgaagagtggatgcttgaaacccgcagcgaaaatgaataacaggtacgcccatgcagcgaatctacgaaccggaaaacctcatggagggcgagctgctgcagcagatgcttgccagtgaaggcatcgaggcgcatttggtggggcgccacctgctcggcggcacgggcgagttgccgatattcggcttgctggggctggaggtcgacaatgaccaggccgccagcgcccgcgagctgatcactgcctatatcggcgcacaaccgttgcccggcgacgaacccgacagctttcccgacgtattggtctgttaggctgtcggtcggtttaccccaagagtcgtgttgccccatgtgtggacgttatgccctgtttcgctggaaccctgcctttgctgccttgcccggcttccccgccgatcagcaggcccagtggaacatttcccccaatgattcggtgctgatccagcgcctgagcgagggccagctcaccctggcgcgtgcccgctgggggctgacgccgccctggctcaccgacctgtcgcgcaccccggctcacgcccgcgccgaaaccctggccgaacagccgatgttccgagaagcattccgccagcgccgttgcctgctgcccgccaatggcttttatgaatggcgcggcacccagcgcaagcgcccgtactggctcacaccgggggagggctcaacgctattctttgccgcgatctgggaagcgtatccggtgcaggagcaggtatggctgagcacggccgtggtcacccaggcggcacagagtcagcggcgcccattgatcctggacgcggcagggcaggccgcctggctcgaccccgcgacaccgcttcatgtgctgcagggcatgctggcggctgagcctgctgcgttgcgcgagcgggtactggccaatatggtcaacgatccgaagctcaacgggccggaatgcctgaccccggcgtgagctttgtcagtcgttccacgttcggatgtatctgaaattcagcggttaaacgtctggtgtatctggcgcagatacaaatgaccgcctacgatacgcgccatgttttcagggagcgtgttcatgaagaagtcattggtggtaagcggtttggttgcagcgatgctgctggcgggttgtcagtcggtcaataccaccagcggcggcgccgttggggtagagcgcaagcagtacatgttcagcatgctgtcgagtcaggaagtcgaccagatgtatgcccagtcttatcagcagaccctgggtgaagccagcagcaaaggggtgctggacaagagcagcgccaacgccaagcgcgtgcaggccattgccaagcgcctgatcgcccaggcgccgactttccgcgcggatgccgcccagtggaactgggacgtgaacctgatcaaaagcgatgagatgaacgccaactgcgggcctggcggcaagatcctggtgtacagcggcttgatcgacaacctcaagctcaccgatgacgaactggctgcggtaatgggccatgaaatcgcccacgccttgcgtgagcatggccgcgaagccatgtccaaggcctacggtatccagatggccaagcagggcgccggggcaatattcggtctcggccaagacagcctggcactggccgataccgtggccaactacggcatgaccttgcccaacagccgcagcaatgaaaacgaagccgacctgatcggcctggaactggccgcccgcgctggctacaaccccaacgcggccatcacgttgtggaacaagatggccaaggcttcggaaggcgcaccaccggaattcatgagcacacacccggcttccgacagccgcatcgcgtcgttgcaggcggcgattccgaaggtgatgccgctctaccagcaggccaagaagtcctgatcgacgccgtgtaggagcgagcttgctcgcgagaaacgtcagcgataacgcgtgttgcctgaataaacgcggcgccggtgagtttttcgcgagcaagctcgctcctacaggcatcagggcttagatccagccgctgctttgcatggccttgtacaccgcaataaccgccagcacgaagaacgccgtagccgccaagcgacgaatcaaggtcagcggcagtttctccgcggcaaaattccccgccagcaccaccggcacgttggcaatcagcatgcccagggtggtaccgataatcaccagccacaattccgggtattgcgccgccagcatcactgtggcgatctgggtcttgtcaccgatttcggcgaggaagaacgcaatcaaggtggtcaggaagggcccgaacttacgggtggtactggcttcatcatcatcgagtttgtccggcaccagggtccacagcgccgtggcgcagaagcttgcggcgaggatccagtgcagcaccgcatccgagaagaaactcccgaaccaggcgcccacggcaccggccgccgcatggttggccagggtcgcggcgacaatgccggcgatgatcggccagggtttgcgaaagcgtgcggcaaggatgagtgcgagcagttgcgtcttgtcgccgatttcggccaaggcaacgattgcggtaggaacgagtagtgaatccagcatcaggtagtttccaggggcgggtcgacacggctatgacacgtacagccttcccgccccgggtaaggtgtgcgtgtcataggtcttgtcaaaccccggtccgtctgtgcggactcctgggtcgcatacgccatggtctgctgaccaagtatgttgacgtatgccggacgagcatggcgctcgtgggagactactcccctaggacgctgcggattctgcctaggcaaaacccattcggcaagcgttctttttcaaacctccctcaggggcgcttggcacggtaaatgcgaaaaccattgccttcggccttgattgcgcagatgcccaaatgctcttcgatcagtggttgatacttcaggaagctattggcaaccaggcgaagttcgccaccttttgccaggtgtttcgccgcttttcgcagcaggttctccgtggcgaaataatcggtgtgcacgccgacatggaacggcgggttgctcaaaatcgcgttcaaacccatgggcgccgcgtcgattccgtcaccggtcaatacctcggcttccaggccgttcgctgccaaagtcagacgactgctggcggcggcgaaggcatccacgtccagcatcgtcacggtgttatgcgggtagcggcgtttgaccgcagcacccagcacccccgcgccgcaaccaaagtcgagcaggttgccgctgggcagcttgtccaagtgctccagcaacaactcggtgccgcggtccaggcgcccatggctgaacacacctggcaagctcacgaccttcagcgggccttcggccagcggtacgtcgaagacctgcgccaggctctcaagcgccacggcttgcggcgcgttggcgacggtgacctgccacaactggcaatgccgtgcgctatcgagcttgcgcggtttgccgaacggagccatctgtttggcggcgctttcgataccgccctttttctcgcccaccagaaacagctcggcgcccggcaggcgcgcagccacggcattgagcaggtagtcggtgaggtctttggacttgggcaggaaaatcaccgccgcatcaaaggcgcgctcgggcactgtcacgccaaactggctgcgttcggcgaagcgcgcatcgagcgccgcctggtcaccggcatgccagcaccagccgtgggcgttgggcaggcgcccaagcaaatcgtcggcaggcaaacccacgagcagcaggttgccttgaaaaagttcggcctggcgaagcagtacttcactgcgcggatccatagtctgctccttgaaaaggggcgcagtttatcaactgacgacgcgcagcggggcgccgctgaaaaagcccagggcgttttccgtgagttggccgacgatgcgctgccgcgcttcgcggctgccccaggcgttgtggggtgtgacgatcaaccgtggaatgcccccagccagcagcggattgccattgacgggtggctcgacgctcagcacatcagtcgccgcgccgcccagatgaccactgcgcagtgcgtcggctagggcctgttcattgatcaagccgccgcgtgcggtgttgacgataaacgcgccgggtttgagcaacgccagttcacgagcgccgataaagtcgcgggtgtgctcgttgagtgggcaatgcagggtcagcgcatcggcctgggtcagcaattgatccagcggcacacggtcggcgcgggcagggcgcccaggtatcgcgccgagcaccacacgcatgccaaacgcttcagccaggcgtgccacggcactgcccagttcaccgtggccgagcaggccgagggttttgccttccagttcgacgatcggatggtccagcaggcaaaactgtttggcctgctgccatttgcccgcggctacatcctgttggtagtccttcaagcgcgtggcgaggttgagcaacagcatgatcgtgtgctgggccaccgacggcgtgccatagccctggcagttgctcacagtgatgccgtgggcgcgggcggcttcaaggtcgatattgttggtgccggtggccgacaccaggatcagcttgagctcggggcaggcggccagggtgtgggccgtgagcgggattttattgctgatggcgacttgggcgccttgcaagcgctccagcacattttctggcgtggtctgttcaaacaactgcaactggctgaagcagtcatgcaaaccgctgaggtcgaggtcgcccaagtccagggaagggtggtcgaggaagacggcgcggcgattgttcatgatcaactgtaccttttgcgacgaggttcgaaggcgtaatctgccgagcctatcagatgaaataatcagttacttaatggagtgagcatgtacgtcgccgagtttttgaccgtagccttgattcacttgctggcggtggccagccccggcccggatttcgccgtggtggtgcgtgagagtgtgacccatggccgccgcgccggcacatggacggcactgggcgtcggttcggcgattttcctgcatgtgggttactcgttgctgggtatcggcttgatcgtgtcccagtccattgtgctgttcaatgcgttgaagtgggcggcagcggcgtacctgctgtacatcggcttcaaggccttgcgcgcccagccggccaagcctgcggccgagggcgagttgcaccgtgaagcgggtgagcgcaccccgcgtggcgcgtttactgcgggctttgtgaccaatggtttgaaccccaaggccacgttgtttttcctgtcgttgtttaccgtggtgatcaacccccacacaccattggcggtgcaggccggttatggggtgtacctggcggtggcgacggcgttgtggttttgcctggtggccatgctgttcagccagcagcgtgtacgcgcggggtttgcgcggatggggcattggtttgatcggaccatgggcgcggtgttgattgctattggggtgaagttggccttcaccagcatgaagtaagcgcgttcactcaagcgggcagggacaaaatgtgggagctggcttgcctgcgatgtcggcctgacagccgacacctacctacctgacatcctaacgatccaactgcgggcttgctcgcgaaggcgggctggcagtcaacacggttggattgtgtacatatccattgctgcggtaacggccgcttagggttccgctctgacagcggctcacttttgaaaagcgcaaaagtaagcaaaacgctcttgccccaccactcggcacctcgcctaggctcggtgtgcccgtaatccgccagtgattgggggggcgccgccacgcgccatccatggcgcggggcggctaaaccggcatccctgccggtttaccccccaaatcactgtcgaattccggccagcgtggtttgacggggcgcttgagatcaagatcaaaagcagatcaagagcagatcaagagcggctcgcttcgcatcgtggttaccgtcgnnnnnnnnnnnnnnnnnnnnnnnnnnnnnnnnnnnnnnnngcgggcttgctcgcgaaggcgggctggcagtcaacacggttggattgtgtacatatccattgctgcggtaacggccgcttagggttccgctctgacagcggctcacttttgaaaagcgcaaaagtaagcaaaacgctcttgccccaccactcggcacctcgcctaggctcggtgtgcccgtaatccgccagtgatttgggggggcgccgccacgcgccatccatggcgcggggcggctaaaccggcatccctgccggtttaccccccaaatcactgtcgaattccggccagcgtggtttgacggggcgcttgagatcaagatcaaaagcagatcaagagcagatcaagagcggctcgcttcgcatcgtggttaccgtcgattgctggaacgcaatgacgtctggataatggcgtaacgctagcatttgctggctcctgcaaatcattcctttggctgatttggctgaaacataagcgctctacagtgcaggtcttcaagccaagaccgtgcagtcattaaagggattcttatgttgcagacccgtgttatcccgcccgccgaaggtgcgtaccaatatccgctgttgatcaagcgcctgttgatgtccgggactcgctacgagaagacccgggaaattatctatcgcgacaagctgcgctacagctaccccacgctgatcgagcgcgttgcgcgcctggccaatgtgctgactgaagccggggtcaaggccggtgataccgtggcggtgatggactgggacagccaccgttacttggagtgcatgttcgccatcccgatgattggcgcggtgattcacaccattaacgtgcggctgtcgccggagcagattctgtacaccatgaaccacgccgaagaccgctttgtgctggtcaacagtgagttcgtggggctctaccaggcgattgccgggcagctcactaccgtcgacaagaccttgttgattaccgatggtgacacccacaccgccgagctacccaatcttgtcggtgagtacgaaaccctcctggccgccgccagccccagctatgacttcgaggattttgacgaaaactcggtcgccaccaccttctacaccaccggcaccaccggtaaccccaaaggtgtgtacttcacccatcggcaactggtgctgcacaccattggcgtggcgaccatcatgggcagcgtcgacagcgtgcggctgctgggcaccaacgacgtgtacatgccgatcacgccgatgttccacgtacacgcctggggattgccgtatgtggcgaccatgctcgggctcaagcaggtgtaccctggccgctacgacccggaatacctggtagaactgtggcgcaaggagaaggtgacgttctcccactgtgtgccgaccatcctgcaaatggtgctcaacgccaaggctgcgcagaacgtggatttcggcggttggaaaatcgtcatcggcggcagcgccctcaaccgttcgctgtacgaagccgccaaggctcggggcattcaactgaccgccgcgtatggcatgtccgagaccgggccgctggtgtcttgcgctcacctcaatgatgagttgatggccggcagcgaagatgagcgcaccacctaccgcatcaaggccggtgtgccgggcccgttggttgaggcggcaatcatggacactgacggtcatttcctgcccgccgatggcgaaacccagggcgaactggtgctgcgcgcgccgtggctgaccgagggttactacaaagaaccgcaaaagggcaccgaactctgggccggtggttggttgcacaccggtgatgtggccacgctggatgccttcggcgtgattgatatccgcgaccgcatcaaggatgtgatcaagaccggcggcgaatggatctcttccctggctctggaagacctggtcagccgccacccggcggtgcgggaagtggcggtggtaggcattgccgatccgcaatggggcgagcgtcccttcgcgctgttggtggtgcgtgaagggcatgtgatcgatgcgcgagagctcaaggaacacctcaagccttttgtcgagctgggccatttgagcaagtgggcgatcccgagccagatcgccgttgttactgaaattcccaagaccagtgtcggcaagctcgacaagaaacgtatccgtgtcgacatcatcgaatggcaggccaacaacagcacgttcctgtccacgctctaagccctctcgccgcgcccgttcgggcgcggcaatgctctatatcaagcctttacttgtgatttgccgaatttcagccatccttcccgcgtcgaccttcgtcggcgtggcgaaagggttgtggcagacaggttggtgatgcaaatcacactttagagggatcaagcactacccccctctggctatagtccctttcagagtttttcgcggatgttgcgcttcgagccatggaggctcggtggcgatgcggcattggaatcgttgtatcccggccgttacatctgaagaaagggctcactgccataacaataaaatatgcacatggagtagcgtcgatgacctcagtaaaccagttctggcgccgggcaagactgcccctggccgtcagcctcgcttctacgctcgccgggccggcattcggcgtcagtttcaacattggtgaaatcgaagggagctttgactcgtcgctttccgtgggggcgagctggtccacggccaaacccaatcgtgacctgatcggtgccaacaacggcggcaagggcctgtcccagacctccgatgacggccacctgaacttcaagcgcggcgagaccttctcgaagatcttcaagggcatccacgacctggaactgaagtacggcgacaccggtgtgtttgtgcggggcaagtactggtacgacttcgaactcaaggacgaaagccgtccgttcaaggacatcagcgacaacaaccgcaaagagggcgccaagtcttcgggcgggcagattctcgacgcattcgtctaccacaactattccattgccgatgcgccgggttccgtgcgttttggtaagcaggtggtgagctggggcgaaagtaccttcatcggtggcggcatcaactccatcaacccgatcgacgtgtcggcgtttcgtcgtccgggggccgagatcaaggaaggcttgatcccggtgaacatgttctacgtgtcccagtcgctcaccgacaacctgtcggccgaggcgttttaccagctggagtgggaccagaccgtgaccgataactgcggcaccttcttctcgcagccggacgtgatctccgatggttgcagcaataacctgcgggtactgaacaagcgttccaccattcctgccgccgccctgccgaccctgggggccttgggtgtggacgtcaacagcgaaggcgtgctggtgcgccgtgggccggaccgtgatgcacgcgacagcggccagttcggcgtggccatgcgctacaacttcgaaccgctggatactgagttcggcgcgtatttcatgaactaccatagccgtgcgccgatcttcagtgcacagggcgcgccatcggcggcctacacgcgtccgctggggccactgggagccttgcggccgttgatcgtggcgggcagctcgaattacttcgtcgagtacccggaagatatccgcctctacggcctgagcttctccaccaccttgcctaccggcaccgcctggagtggtgagttgagctaccgtccgaatgcgccggtgcagttgagcaccactgacattctgttcgccggtgtcacgccgatcccaggctttggcaatgcgtctgtgctcaagggcacgccgggccaggacctgcacggctacaaccgcaaggaagtcacccagttccagaccaccttcacgcacttcttcgaccaggtcatgggcgccagccgcctcaccaccgtcggtgaaatcggcgtgacccacgtgggcggcctggaaagcaaatcccaggctcgttacggccgcgacccagtgttcggcccaggcacgttgccaggtgggttctgcaacgccctcaacaactccaccgccaacggcgccggcttgcccaacgctgccggcctgaacaccaactgcaataacgacggttacaccactgcaacgtcttggggctaccgtgcccgtgccatctgggaatacccggatgtgttcgcgggcgtgaacctcaagcctaacgtggcctggtcccatgacgtcaaaggttactcgccaggccctggcggcaactttgaagaaggtcgcaaggcggtcagcctgggcctggatgccgaataccagaacacctacaccgcgagcctggcgtacaccaacttctttggtggcaagttcagcaccgtggatgaccgcgactttgtcgccttgagcttcggcgccaacttctaagcacactcttttcaagtggcatgtattcaggaagaccagagcatgaaaataacaaaaagtctgttgcacgtgggtgtgcttgggctgtcgatcctggcgagtaacgtcatggcggcagtctcggcagatgaagccgccaagctcggcacgaccctgaccccgatgggcgccgagatggcgggtaacgcggctggcaccattccaaaatggtcgccattgccgaccaatgccggcgcagtcgacgcccgtggtttcctcgccaacccgtatgccagcgagcaaccgcagttcaccatcaccgcgcagaacgtcgagcaatacaaagacaagctggcccccgggcaatacgcgatgttcaagcgttacccggacagcttcaagatgccggtgtacccgacccatcgcggtgccaccgtgccggctgaggtgtttgcctcgatcaagaaaaacgccaccaccaccaacctggtgtccggcggcaacggcctggaaaacttcgaaaccgccgtcccgttcccgattcccaagagcggcgttgaagtgatctggaaccacatcacccgttaccgcggcggcagcgtcacccgcctggtcacccaggccaccccgcaaaccaacggttcctacagcctggtgtatttccgcgaccagttcgtgttccgcgacaagatgaaggacttcgatccgaaaaacccaggcaacgtgctgttctacttcaagcagcaagtgactgcgccagcgcgcctggccggtggtgtactgctggtgcacgaaaccctggaccaggtcaaagaaccgcggtcggcctgggtctacaacgccggtcagcgccgcgtgcgtcgggcgccccaagtctcctatgacgggccgggcaccgccgccgatggcctgcgcacttccgacaacctcgacatgtacaacggtgcgccggaccgctacgactggaagctggaaggcaagaaagaaatctacatcgcctccaacagctacaaggtcgacgatcccaagctcaagtacgccgacatcatcaaggctggccacatcaaccaggacctggctcgctacgagctgcgccgtgtctggcacgtggtcgccaccttgaaggaaggccagcgccacatttacgccaagcgtgacttctacattgacgaagacacctggcaagccgcggtgatcgaccactacgacggtcgtggccaactgtggcgtgtcgccgaagcccatgccgagaactactacgacaagcaagtgccgtggtacgccctggaaaccctctacgacctgcagtccggccgctacctggccttgggcatgaagaacgaagagaagcaggcctatgactttggcttcaccgccagcaccagcgacttcaccccagcggccctgcgccaggacggtgttcgctaacctctgctaatgatcgctcccacgctctgcgtgggagcgcttcctgtgacgctctgcgtcacgcctcacgcgcccatcctgaatgggcgcgttgtttttgagcccttcgcgagcaagctcgctcctacttctttcttggtggctggaagagatattttttgtcgcagttctttttcagccatttgttgcaaagatctacaatcccgccgcttttaccgctagtctgcggacatctgcaatgccgacaacagccttctacaagagcccggcgatgactgatctgtcccgaacccatgggcctgccagtgtggtgatgccgaccctggaaggccgcttctacaggccgccgctgcctgacggctacgtgctgcgcccacgcctgtgcgaacggctgaatgcgggcctggaggggcgactgttgctggtcagcgcgcctgctgggtttggcaagagttcgttggcggtggagttttgccagggcttgccagctcagtggcaaagcctctggttgggcctgagcccaagggacagtgaccccggccgtttcctggagcggctgctcgacggcttgcaacagtatttcccgcaactcggcgcccaatccatgggcttgctgaaaatgcgccagcgtcaccaaccctttgccttcgaagaatggctcgatggcctgctcgacgagctggccatgcacctgtctgcgcgttcgccgttattgctggtgctggatgactatcacctggcccagggcccggtgctggatcgctgcctgcaatttttcctcaaccatttgcctgatggactggtggtgctggtcaccagccggcagcgtccggactggcacctggcacgcctgcgcctgtcgcggcacctgttggaactgcatgagcaagacctgcgcctgactcacgatgaatccctggcggtgctggatggacacggcaatgcgttgcgcggtgaggcgttggaaaacctgatccgccgtagcgagggctgggtcgccggcctgcgcttctggctgttggcggcctccgaagcgggcagtgagggcgccttgccccaaagcctgcacggtggcgaagggctgattcgcgattacctgctcgaagaagtcatcgactgccttcccgcagaagtgcaagcgttcctgtacgacaccgcaccgcaggagcgcttttgcagcgaactgtgcgacgccatccgagaggcccatgacagcgcagaaatcctgcgttatctgcaggctcatcaagtgttcctggtgccgttggatgagcaagggcactggtaccgctatcaccatttgttctccgatctgctgcgcacccgccgcgagaagagtgccaccttgccgccggccagcttgcacttgcgcgcttgtcgctggtttaacgcccagggcttgatcgacgaggcggtggagcaggcgctgcgggccgggcacctggatgtggcggcgaacctggtgcagaacctgtccgaagagcaactgctggcagagcagaacatcggcatgctgctgcgctggaagatggacctgcccgacagcttgctgatcagcacgccgcgtttgatcgtgctgtacagctgggcgctggggctcgcatgccaactggatgcggcgcaggaactgtccagttacctcagccgcttcctgccggcgccatcggccaccgcgcaaaaatccatgttggcccaatggttggcgctgagcgggatcattgcccgtgggcgcggagaccgtgagctgactcagcgctattgccaagaggcgttggaaagcctgccgcaaaagcgttacggccagcgcctggtgtgcctctcgactctgtccaacctggcaatcgccgatgccgacctgtggcgcgcccgtggcctgaaccgcgaatctctggaactggcgcagcgcgtcggtaaccccttgtttgaggccttggcccattacgaccgagcgcgggtgttgcagtcgcgaggtgagatcctgcgttctctggatgaagttcgccaaggcctggagcgcctgcatgggctggcaccccagcgcctgtatgccgtgcgcgcacggttgtcgctttacgaaggttacctgctgttggtgcgttaccagcccgaagccggccttgcgcgtttgcgcgccggcctgaccgaggcccgcgcctgccgcgatatcagtgtgctgatcgggcactgtgtcatcgccagtttcgaagggcggcgtggggagtttgccaatgcctttgccgaactggccgaggccgagcgcttgatgcacatctgggatgtgccgccgatctattacctggcgatgatcaccctgatcaaatgcgagctgtggctggcccagggtcgcactgacctggccgacgcctggctggcccgcctggggcagacctacaacggcgagcacgccgcggccgcccccgagtttcatccgcacctgccgcaacatatcgagctgcaacaagccgcgctcgatgccactcgccatcaacccgacagtgcgctgcaacgcctcgaagcgctggcccagcaggcccatgacagcgggcgccagatgattgccctgatggcgctggtccagcaggtgcagttgcttctggagaatggccaggaggctaaggccaggccggtattggcccgtgccctgcaagccggctcgggcggtgcgttgcagccgtttcaacgcgtgttggagggttacccccagtggatgcgcgagcagctgggcaaggactcccatgggctgctcaaccagagcttgctggcgctgctgccccaagtcattgcggttgaagcctcacctcaacaggaaaccctgagcacccgagagctggcagtgctgcagctgattgcccaaggctgttcaaaccaggaaatcagcaatcagctgttcatctccctgcacacggtgaagacccacgccagccacatcaacagcaagctcggcgtggagcgtcgtacccaggcagtcgcgcgggccaagtccatgggcttgctggcctgagcccgtggctcaaggcgcggtcgggcagcccttgagtgaagtgtcgacggtctgattgatcagcgccgcgaaccgcttgaggttgttctggtgcgccaccaccagttcgtcgatgctcggcccggcaggcgactgcaaagtggtgcggcaggtcaacgccggacggtcgccattgatttgcctcaggcgccagcgcacatcgagcaacgcgtactgccccggtaccgagtcaaagcgctgcacgtccacgcgcaacgccacggcttgccgggcattgctgctggccaactggtccaccagggcgctcttaagctcatcggcgagggtggccgcccaccactgggtttcaagaatcgccaggccgctgtcgccctggcgaatcactatctgcgcgcggtcgacctgaggcggcacgctgatgctctcaatgcgtacaccgccggcctctgctcgcgtactcgggctcaagtgtgccggggtcagggtgtgaaaggcgatgggttcactgcgacaggcaccgagcatcagcagggcgctcagcaacgtgatcttcaacggcaatgtcatggcggctccaatggtcatttgcggggtggcccttgcaggtccgtcggtgcggcgttatcggggcggccgcgaatcagcgactccggatgccggcccaggtaatccgaaagctcgcgcagggagcgcgacatgcgccccaactcgtcgagggtctgggtcagttgttcacgctgtggcgagtcttcggccagggttgaactggccgattgcagggtcttgctcacgtcggtcaaggtcgtctgcacacccggcagtgtcttggcgttgaattgcgccaggcccttgcgcagttcgaccaggctggcatcgaggttgccggcaatgcgctcgacaggcagttggctgatcttgttgacgatgccttcgaacttctcttgcagttgttccaggttgcccgggatggtggggatgcccacgggtcgctggttcgggtcgaacgcgactttctcggccttggggtagaagtccagggcgatgtacagctggccagtcagcaagttgccgctgcgggcctgggcgcgcagaccgttttcgatgaaggtaccaatcaggcgtacgccggcggcctcatcgtcagggttattgttcatggccttgagcagcttggtgtgggcctcgccgagcagttgcgggtagatcacgatgccgacattgaccgggaaggtgcgtttcttcgcatcgaaatccaggttgatcgatacaaccctgccgaactccacgccaaggaactccaccggtgcgtcgactttcagcccgcgcagagcctgatcgaaacgcaggaccatgtattggcccttgccgttgggtggggcgagggcgctttgctggtcttcgaacaactcaaagctgcgactttcttcggccggtttgtcattggggttgtagggcggcgcctggaaggcgatcccgcccatcaacatggacgacaaggattcggttttcagcgcgaagccattggcgccaacgctcaagtcgacgccactggcgttccagaaccgcgtgttctcagtgatgtacacgtcattgggcgcatgcacgaagatctcgacattcacgcccttgccctcgttgtccagctcataggccaccacctggcccaccgggattttgcggtaatagaccggcgagccgatgtccagggagcccagagcctgggtgtgcagggtgaagcgcttgcccggctcgccgtaagtgatgggcggcgggttttccaagccggtaaagtgcttggcgcgggtctcggactggccgatgtctgcgccgatgtagtcgccggacaacaacgtgtcgatgcccgacacgccgcctgcgccaatgcgcgggcgcaccacccagaatttcgaatcttcgcgggtgaagctttcggcctgtttgaccagctcgacggtggcgttgacgcttttctggtcatcactcagggccacggcagttacctggccgatcaccacgttgcggtatttgacctcggttttgttggcaaccagcccgctgccggtcttgaagttgaggacgatggtcggcccttgttgcatgacgctgtggatcaccagcgagatccccaccagcacggcgacaatcggcacgatccagaccagcgaaacgctgaaacgacgcgtcttgatcacgggttgccccgcaggggtgtcagccttggatgagctcatccgaggtctcctcgttaggtgggttttcccagattagccggggatcaaagctcatggccgcgagcatcgtaaacacgaccaccaggccaaaaaacagaatacccaggcgcggttcgatcgtgcccagggcttgaaacttcaccagcgcggccaccagggcgaccacgatgacatcgagcatcgaccagtagccgatcagttcgataaaccgaaacagcttcgaacgctccttgcgcgcccactggctattgcgctgcacggtgaccagcagcagccccagcgacaagaacttgatgcccggcacggcaatgctggcgatgaaaatgatcagcgcaatgtcccaggcgccatgctgccagaactccagcacgccgctcatgatggtgctgtctgcgcccgagccgagcatggtggtgttcatcaccggcaataaattggccgggacataaaaggcgagggcagtgagcatgtaggcccaggttcgggtcagggactgcaccttgcgccgatgcagcgcggcgccacagcggtcgcactcggtgggttcaaggcgcatgtcgcagggctggccgcaggtgtggcacaggcacaggttcagctcgcgagcggtgggcggtgaattcatacggtgtcccacaggtcacgcacatcgcgcccggcaatgcggatcagcaacaggctcagggcggccaaggcaaacaggccggtgccagggatcacatccagcatgccggccagcttgaacaccgcgaccatcgcgcccagcaggcacacctccagcatgctccaaggcctgagcgcttcgagccagcgcatgcacagcttgaacgctggcgagcgccggccggccaaggcgaaactcagcacccagatcagcaacgctagctgaaacaccggggcgataatgatggagatcgctgccaccagtgcaatgaacgtgattggccccaggctcagtgcaaccactgagtcccagagggtggcgctgtttttcaagccttgcaggctgatgctcatcaccgggtaaaagttggcaaaggtccacagcactgcggcagtcaccgtcagggccagacgttgttgcaccgacaggccgttatagcgctgcagcacgcccgagcaacgtacgcacagggctttctgatgtttggcgagcgtgactttctcgtacacgcagtcgcagtgttcgcagatgatctgttgattcgccatgggtgttgctccaaatgcgactgactgcagcgggggatttcaatggcgcgtgtgtagcttagcagcggatagatcgcgcaatcgacgccttcccgcgcagaggcaagctacaccatactgcacttggaacgcgccagagagcttgcaggacacccatgactattgaaaaacaaccgttgattcgcgaaacctttcccgtcgggccgttgcagtgcaactgcaccatcattggcgacccgatcactaaaaaagccatcgtagtcgaccctggcggcaatcacgagttgatcctggcgcgccttgatgcactgggcctgaaggtggtgagcattatccacacccatgctcaccttgatcatttcctggcctccgggcaattgaaagaaaagaccggcgccacgctgcacctgcacaaagaggatcaatttctgtgggacaacctggaaatgcaatgccagatgtttcgcgtgccctacgtcccggtgccgtctccggatcgctggctggagcatgacgaagaacttgcctgcggttgtggcgtagccttgcatactcctgggcatacaccgggctcgatgagtttctggtttgccgacgccaagctgttgatcgccggcgataccttgtttcgtcgcggggtaggacgtacggatttatggggcggcgaccaggcgacgattgtgcggtcgatcaagcagcgcctgtatacgctggatgaaggcgcgacggtggtcactgggcatgggccggatacgttgctgggcgatgagatgcgggagaatcctttcgtgcgtgcgtgatgggttgtcggctctgatacaagccggtacagacacacaggcacagacccaagccaaagacagctatgctttacgcacccctccacggaatttttaccgtttgtcgcgttccaaactcggcacaggtccattgccaatgtcctctgcatcacagaatgcaaaagtaggagcttccttcatgttcactccgcgtcgtctgcttgttgtcgctaccgccgtagccctgttgtctggctgcgcctcacctaacccttatgacggcagccagggacaggccagcaatggttccgaaagcggcatgagcaaaaccgccaaatacggcggcctcggtgcgctggctggcgcattggccggtgcggccatcgaccataacaaccgtggcaagggcgcgctgattggcgcggtggttgcgggtgccggtgcggcaggttatggctactacgccgaccagcaagagaaaaaactgcgtgaaagcatggccaacaccggggttgaggtgcagcgccagggtgaccagatcaagctgatcatgccgggtaacattaccttcgccaccaactcggacgcgatctccagcagcttctaccagccgctgaacaacctggccaactccctcaagcagttcaaccagaacaccatccagatcgttggctacactgacagcaccggtagccgtcaactgaacatggacctgtcccagcgccgtgcgcagagcgtggccaactacctgacctcccaaggcgtcaacggtgccaacctgagcgcacgcggtgccggcccggataacccgattgccagcaacggcgatgtgaacggccgtgcccagaaccgtcgtgtcgaggtcaacctcggcccgatccctggccagcaatacggccaacctgcgggccagcagcaggcgccacagcagaacaaccagttccagggcaacccgtaccagcaataccagtaaacgttaaacactaaaaagggcgccgtgcagtcaatgcacggcgcccttttttgatcgttcccacgctctgcgtgggaatgcccgctccttcggacgctccgcgtcctactcttggcgcaaaagctgaagcgtgtgcggtgacgcggagcgtcacgggatgcgttcccacgcagagcgtgggaacgatcaggcaccttcgatctacatcagtcgatgtattcgaacaccttcacaatcttctgtacgcccgacacgccctgcaccaggttggcggcgcgggtggcttcggcctgggtcagcaagcccatcatgtagacgatgccgttgtcggtgacgatcttgatccgcgaaccaggcaccgcactgtcggtcagcatctgagccttgatcttggtggtcagcaaggcatcgttgctgatggccagcagggtgatcgggtccatgacctgcagttcgttgtggaccttcttgacgcgttgcacgccggcggcggcttgctcggcctgggccttgagatcggcgcggggcgtttggcctgccagcaggaccacgccattgaagctggtcactacaatgcgcgaggcaccgttgcccaggtcggtagcggccttggcgacgttgaccttcaccttggtttcgatcagcgaatcatcaatggtgctgccgaacgtacgtgtgccccggtcatcctggataggggtgtcccgtgtagcggtgatagccgagctgcagccactgatggcgacgcacagcgtgatggccaaaagactgaggcgattaacggtcattcttcactcccgaacagttggctgtcgatcagatcgcacaggcagtggatcgccagcagatgaacttcttggatacgtgcagtgatattggccgggacgcgaatctccacgtcctcaggcagcagcagcgacgccatgccgccgccgtcgcgaccggtcaaggctacgacaatcatttcgcgatcatgtgcggcctggatcgcttgaataatattggccgagttgccgctggtggaaatcgccagcaacacatcgccgggctggccgagggcgcggatctgcttggagaagatttcgttgtagctgtagtcgttggcaatcgaagtgatcgtcgacgaatcggtggtcaaggcaatagccggcaggctcgggcgctcgcgttcgaagcggttgagcagctcggaggaaaaatgctgggcatcgccggccgaaccaccgttgccgcacgaaagcattttgccttcgttgagcaaggcattgaccatcacctggctggcttgctcgatgtgcggtgcaagtacgtccatcgcctgttgcttggtgtcgatgctggcctggaaaagctggcgaattcgggattgcatgtccatctgtgtgaccttaagtagcgcggctgtttggcacaggtaatgtgcagcccgcaaagcaaagagcaaaaatgagtggtgaaggtgcccggcgaatcagctgtcgaaggcatttttgagccaggtcagatcagctgtgcctgacggggtgctttccatggcaaccacatcgaaacggcaggggcagtcagcccagcgatgctctttttgcagaaaaaactgcgcggcgagtatcagcttttgacgcttgcgcccgtcgatactggcgagcgcgccaccccattgtgcgtgttttctgtagcggacttcgacgaatactactgtatcgccgtcaagcatgaccagatcaagctcgccgcgtttacataaccagttctgcgccagaaggcgcagaccctgttgttgcaggtaattgagtgcatgcagttcggcatccttgccgctttgtgcgctggaccgctcgggcatcagcgtggggtatcaggcaggcgctgaatgtcgccgccgacgaacttcgcccacggcatctggcgatcgacgcgctggttggcgctgatgcccaggttgcccgagaggccgtcgacacgagtgtccggcagtgccttgagctggcccaggcgtggcgccaggcggtaggcatccacgcccatcgcatagaggcggcccaggctgccattggcttgcggccattgtgcggcgacttggttgcgcagcgggtcggtggtgttaagcagccaaggggtttcgcagaacatgacattggtcatgtccaggtactggttgcggtcaccgctggcactgaacacgtgagaggtcgcgtacaccggcacatcgccggcgtattggaagttcagggtcggtttgatctgttgggccagttgcggcgtgacggccaggaagatgaactcgatgtcctggcgacgcgaaggctgggcggccacgtcggtgccgaccgtgctttgcaggctcttggcgcggccttcgctcttgcgcagttggaacagatcggcgatctgctgggccagggccacaggctgatcgacatattccacgcccatgacggtgccaccattggcttcccaatcctggcggaacgccttgtacacgcgctcaccccattcgccacggggcaccatggcggcggcgcgatgcaggccatcggcacgcgctcggcgcgatacttcgcgggcttcgtcttcagcggccaggccgaactggaacagctgcgccgggccttgatcggtctcgctgtagttcagggccagggtggtgatcggcaactgcgggcgtgcgctgagttgcttgaccagcggtttttccagcgggccgaccaccagttgcacgccggcggcctgggccttggcgtagaagtcgtcgagggaggtcaggcgcgagctgtcatagaactcgataaccggtggcttttgcccggcttgctcagcctggtagtgagccgccatgaagccttcgcgcagcgctttgcccacagcggccagcgggccttcctggggcagcagcagggcgatcttgttcaggggctggctggccagttccttgagcttggtcagcggcgctggcagttgcaccgccgccgggtggcccgggttctgcgcgcgccaggtgtcgatggcggcttgttgttgctccagcgtaccggcgcccttgaccgcctgggccagggtgatccaaccatcgagtgtcgggttgccggtggcttgcagctgttcggctggcagcgcggcaatcaatacccaaatggcttcgtggttgctgctggcagcctcacccgtcagcaggggcgccatggccacgcgctcacgagcggcggcgagggtctggccgtcggcttcataggcgcgtgcatgcacggtgccggtgcggatctgctggtcggtcggcagttccttcaggctttgcaggctggggtggttcagcgctgccaaggccgccttgggctggttgcgccccatggctagttctgcggccagggtgctggcaaatacttgcgcggctggcttcagggcatccaggggcacttgcgcaaggatctgcgaggagcggccgggattgttctgctggtaggccaggtctgccgcgctcaggcgcagcaacgcggctttttctggcgtcttggcgttcgtcgcctgttcgagcagttgctcgatactggcatcgggcgtgcgtggcagttcgccaagactggaggagggcgaactggcgcaagcggccagcaaggcagcgaggcagaggacggagagcagccgcaggcaagcgatcatgtaagtgttcctgataccgatcaaattagcgtggaagtgtacccaagcactggcccaggcgcgatgttcatggcgttaaaccgtggatttaggtcgtgcaaatgttgccagtagctgacggtggctgaaacggcatcggccgtgatggcatattttcaaggcttctacgcgctacaatgtgacttttgccaaccatcgaggtgtgcgctttgactgctccaggtcctttgaattccactgcaggctcgctttttgtggtggcgacgcccattggcaacctggacgacatcagtgcccgggcgctgaaggtgttgcgcgaggtgaaattgatcgcggcagaagacacgcggcactcccaacggttgatgcagcattttggtatcagcacgccattagcggcctgccacgaacacaacgaacgtgaagagggtagccgcttcatcacgcgccttttggcgggtgatgacgtcgcactgatttctgacgcgggcacgccgctgatttccgaccctggttaccacctggtccgccaggcgcgcgccgctggtatcaatgtagtgcctgttccaggagcctgcgcgctgattgctgcattatcggccgccgggttgccctcggaccgctttatcttcgaaggcttcctgcccgccaaggctgtagggcgtcgggcgcgtctgcaggcacttaaagaagaaccgcgcaccttgatcttctatgaggccccgcatcgcattcttgaatgcctgcaagacatggagctggtgtttggcggcgagcgcctggccttgctggcccgggagttgaccaagaccttcgaaaccctcaaggggctgccgctggaggcgttgcgggcgtttgtcgagggcgatagcaatcagcagcgcggcgaatgcgtggtgctggtagccggctggaccgcgccggagagtgaagacgcggtgggcagcgaggccatgcgcatcctcgatttgttgctcaaggaaatgccactcaagcgcgccgccgccctggctgccgaaattaccggggtgcgcaagaatgtgttgtatcaggtcgcgctcgataaacagaaggccgaatagttccggggccaaaactgtatttcgtctgaacgtgatggcaatgctgcacttttaatacttgtcctcaagccgccgtgccgttaaccttcgcggcggagagtcgattggacagtcgctgccctctatgaaaattaggggggggaggaaagtccgggctccatagggcgaagtgccaggtaatgcctgggaggcgtgagcctacggaaagtgccacagaaaataaccgcctaagcacttcggtgccggtaagggtgaaaaggtgcggtaagagcgcaccgcacgactggcaacagttcgtggctaggtaaaccccacttggagcaagaccaaatagggtcccaaggcgtggcccgcgctgggaccgggtaggttgctaaagatgtccagtgatggccatcgtagacgaatgactgttcaagacagaacccggcttacagatcgactctccaccttttctccttgcgttcgaatctcgtgcgcaaacccggtagtaacgcaagaatccctccctgccaaatcattggcagatgcatcttcgtaataccaaaaaaatcttactcttaataaaacactttaactttaagccctagctctttgagctgtttgctgttgttgagtcaaaaacatcgcaaaactctcgtttctcctccctttaccttcctaaatctccgttctgtaaggcttttccttgaatacgcgccttgacggtgtggtgggcgcattcctatagtgtgcgcaagtggcggaaagtggcacaaagtgggttttttgaacgtaaaacgctaaaatttggagaaacgcatctgtgtttcgcggagctaacgctatcagtctcgatgcaaaaggccgtctcgccatgccgagccggtatcgtgacgagctcatttcgcgaagttcagggcagttaatcatcacgattgacgccgttgacccctgtttgtgtgtttaccccctcgacgagtgggagttgattgaaaccaagttgcgcgcgctgccttcattgcgagaagaaaaccgccgccttcagcgtttgctgatcggtaatgccgtcgaccttgaactcgatggcagcggtcgtttcctggtgcctccgcgactgcgcgagtacgccaagctggacaagcgcgcaatgctggtaggccaactgaacaagttccaattgtgggacgaagatgcctgggatgctgtttctgcagcggacctggctgctattcaacaaccgggcgccatgcctgatgaactgcgtgatttgatcctgtgactattgatagcggctttaaccacatcaccgtactgcttgacgaagccgttgaggctctcgccgtacgtgccgatggctgctatgtcgatggcacattcggcaggggcgggcatagccggttgatactcagccagctcgggtccgacggcaaactcctcgggttcgacaaagatcctcaagcgattgccaccgggcaagcgctagcggccgaagacggccgctttgtcgttgtgcagcgcagctttgccgagctgggcgccgaagttgccgagcgcggcatggcgggcaaggtggccggggttctgctcgacctgggcgtgtcttcgccgcagctcgatgacccggagcgcggcttcagcttcatgaacgacggccccctcgacatgcgcatggaccctacccgtggggtcagtgctgcacagttcatcgccaccgcaccggtggaagaaatcgcccgtgtgttcaaggaatatggtgaagagcgcttcgccgggcgcatggcgcgtgccgtggtcgagcgccgcgaaatccagccgttcgaacgcaccgctgacctggccgaagtgctgaaggtcgccaatccggcctgggaaaagggcaagaacccggcgacccgtgcgttccagggcctgcgcattcacgtcaacaacgaattgggcgatctggaagccggcctcgaagccgctctggatgctttggaagtgggcggtcgcctggtggtgatcagcttccactccctggaagaccgcatcgtcaaactcttcatgcgtcgtctggtcaagggcgaatccgacaacctgccgcgtaacctgccggtgcgtttcgaagcctttgtgccgaaaatcaaaatccatggcaaagcgcagttcgcttccgaagccgaactcaaggccaacccacgttcccgtagcgccgtcatgcgtgttgcggagaagttgcggtgagcaagcttttcgccaagcccctcccgggcggcagcttctttatgttgctgctgtttgtcggcgtgctggtgtccgcgattgcggtgtcctacagcgcccactggaaccgtcagttgctcaataccctgtacggggaattgagcgtgcgtgataaagcccaggcagagtggggccggttgatccttgagcaaagcacctggacggcccacagccgtatcgaagtgctggccaccgaacagctgaagatgcacatccctggcgcggctgaagtccgcatggtggcgccatgatgaaactcgaaggggcactctacccgtggcgcttccgcctgatgctcggcttgctggcattgatggtgggcgcgatcgtctggcgcatcttcgacctgcaggtcgtcgaccgcgacttcctgatcggccagggtgacgcccgcagcctgcggcatattccgattcctgcacaccgcggcctgatcaccgaccgtaatggcgagcccctggccgtcagtaccccggtgaccaccctgtgggccaacgccaaggaactgcaagttgccaaggacaagtggcctgaactggcggctgccctggggcaagaccgcaaggccctgaccgagcgcctggaagcccaggccaacaaagaattcatctacctggtgcgcgggcttacccctgagcaaggccagcaagtgctcgaccttaaaatccccggtgtctacggtatcgaggaatttcggcgtttctacccggccggtgaaaccaccgcgcacatggtgggtttcaccgacatcgatgaccacggccgcgaaggggtcgaactggcctatgacgaatggctggctggggttccgggcaaacgccaggtcatcaaggatcggcgcggcaggctgatcaaggacgtccaggtcaccaagaacgccaaggctggcaagcctctggcgttgtcgatcgatttgcgcctgcaatacctggccaaccgcgaactgcgtaacgcgatcatcgagaacggcgccaaagccggcagcctggtgatcatggacgtgaagaccggcgagatcctcgccatggtcaaccagccgacctataaccccaacaaccgtcgcaacctgcaaccggcgatgatgcgtaaccgcgcaatgatcgacgtgttcgagccgggttcgaccatgaaagccatctccatgagcgctgccctggaaaccgggcgctggaaacctagcgacaaggtcgaggtttatccaggcaccttgcagttgggcaaatacactattcgtgacgtatcccgcactgaaggtccggtgctggatctgacaggcatcctgatcaactccagtaacgtgggcatgagtaaggttgccttcgacattggcggtgaaacgatctatcacctggcgcaaaaaatcggcctggggcaacccaccggcctcgatttcccaggtgagcgcgtgggcaacctgccgaactaccgcgaatggagaaaagccgagactgccacgctgtcctacggctacggcctgtcggtgaccgccatccagttggcccacgctttctcggtattggccaataacggccgcatggttccactgagcctgatccatgtcgacgaagcgccaaaagccacccaagtgatcccggaaaacgtcgccaagaccatgcaaggcatgttgcaacaagtgatcgaggcaccgcgtggcgtattccgcgcccaggtgccggcgtaccacgttgcgggcaagtcgggtacggcgcgtaagacttcggtgggcaccaaaggctatgccgaaaactcctaccgatcgctgttcgccggcttcggcccaatgagcgacccgcgctacgccatcgtcgtggtcatcgacgagcctagtaaagccggctacttcggtggcctggtttcggccccggtgttcagcaaagtgatgtccggcaccctgcgcctgatgaacatcacgccggacaacctgccgccgactcaacaagccaacgccggcccaccggccgcagcggtcaaagccaatggagggcgcggctgatgtctcttagcctgaacaagatttttgcccatgccggccacgatctgctgattcgtgagctgactctggacagccgtaatgtgcgcgccggtgacctgttcctggcggtacccggcggcaagctcgatggccgtgcgcatatcgccgatgccctgcaacgcggtgcggcggcggttgcctatgaagtgcaaggcgccaccgtgctgccgatcaccgatgtgccgttgattccggtcaagggcctggctgcgcagctttctgacatcgccgggcgtttctacggtgacccgagccgccaactcaacctggtgggcgtgacgggtaccaacggcaagaccagcgtgacccaattggtcgcccaggcgttggacctgctgggtcagcactgcggcatcgtcggcaccctgggcaccggtttctatggcgcgctgcaaagcggcctgcacaccacgccaaacccgattgccgtacaagcgaccctggccgacctgaaaaaggccggcgccaaggcggttgccatggaagtgtcttcccacggtctggaccaagggcgagtcactgccctggcctttgacgtggcggtgatgaccaacctgtcccgcgatcacctcgactaccacggcaccatggaagcgtacgccgccgccaaggccaagctgtttgcctggaatgacctgaagtgccgggtggtcaacctcgacgacgcgtttggccgccaactggcgggccaagacagcgacgcgcgcttgatcagctatagcctgcaagatgccagcgcctacctgtattgccgcgaagcccaattcaatgacgaaggcgtgcgtgccaccttggtgacgccgcagggcgagcaccacttgcgcagcaccttgctcgggcggttcaacctgagcaacgtgctcgccgctatcggtgcactgctgggcctggactacgccctggatgaaatcctgcgggtactgccgaagctggaaggcccggccggtcgcatgcagcgcctgggtggcggcacacaaccgctggtggtggtcgattacgcccacactccggatgccctggaaaaagtcctcgaagccctgcgcccacatgccaagggcaagctgctgtgcctgttcggttgtggcggtgatcgcgatcgcggcaagcgcccattgatggccgagatcgtcgagcgcttggccgatggcgtactcgtcaccgacgacaacccgcgcagcgaagacccaagccagattttcgacgacatccgtgtcggtttcaaagacgcctccaaggtcacgtttgtggctggtcgcggcgccgccattgcccagctgatcgccagtgccggcgcggacgacgtagtggtgctcgcgggtaaaggccacgaggactatcaggaaatcaacggtgagcgccatgccttctccgatctggtcgaggcggatcacgccctgaccgcctgggaggtcgcccatgcttaaagcgatgacattcagcgagctggcccaggccctgtcggcccgtgtgctgtcgagcgactgcacattcaatggcgtgagtatcgacagccgtaacatccagccggggcaactgtttgtcgccctggccggcccgcgtttcgatggccacgactacctcaacgacgttgccgccaaaggtgccgtcggtgccctggtacagcgtgaagtggccgattccgccttgccgcaattgctggtagccgacacccgcctggccctgggccaactgggcgcgcttaaccgcgccgcttttgataagccggtggcggccattaccggttccagcggcaagaccacggtcaaggaactgcttgccggcgtcttgcgcacgcgcgggccggtactcgcgacccgtggcaacctgaacaatgatttcggcgcaccgctgaccctgctcgaactggccccggaacacacggcggcagtgatcgaactgggggcttcgcgcatcggcgaaatcgcctacaccgtggcgctgacccagccgcacgtggcgatcatcaataacgccggtaccgcccatgtcggcgagttcggcggcccggaaaaaatcgtcgaagccaagggcgaaatccttgaaggcctcgacgcttcgggcactgcggtactgaacctggatgacaaggccttcgagacctggcatgtacgcgccgccggtcgcaaggtcctgacgtttgcggtgctcaatgccgcagccgatttttacgcctccaacatcaatgtcgatgcccgtggctgcccgtctttcaccttgcacaccccgcaaggtgatgagcacgtgcagttgaatttgctaggcaaccataacgtcgccaacgccttggccgccgccgctgccgcccatgccctgggtgtgtcgctgttcggtattgccacaggcctgggcgcggtgcagccagtcaagggccgcaccgtggcgcaactggctggcaacggcatgcgcgtgatcgatgacacctacaacgccaacccgtcctccatcaatgccgctgtggacctgctcaaaggctttgatgggcgcaaggtcctggtactgggcgacatcggcgaactgggcgattgggctgaacaaggccaccgtgaagtcggcgcctatgccgccggcaaagtggacgcgctctacgccgttggtacgaacatggcccatgcggtcaacgctttcggccctggcgcgcggcacttcgccagccaggccgagctgatccaggcgttgacggcggctgaacatgacacacacacaaccattttgatcaagggatcgcgcagcgcggtgatggaaaacgtcgtcgcagccttgtgtggctcaagtacggagaaacattaatgctgctgctgctggctgagtatctgcaacagttccacaaaggcttcgcggtcttccagtacctgaccctgcgcgggatcctgggtgtgctgaccgcgctgtctttgtcgctgtttttagggccgtggatgatccgcaccctgcagaacctgcaaattggtcaatcggttcgtaacgacggcccgcagtcgcacctgtccaagtccggcacgcccaccatgggcggtgcgctgattctgtcgtccatcggcgtcagcaccttgctgtgggccgacctgcataaccgctacgtgtgggtggtgctgctggtgaccctgctgttcggtgccatcggctgggtggatgactaccgcaaagtgatcgagaaaaactccaaggggctgccaagccgctggaagtatttctggcagtcggtgttcggcctggccgccgcgatcttcctgtacaccaccgcgccaagtgccgtggaaaccaccttgatcatcccgatgctcaaggacgtgagcatcccgctgggtgttggttttgtggtgctgacctacttcgtgatcgtcggctccagcaacgcggtgaacctgaccgacggcctcgacggcctggcgatcatgccgacggtgatggtgggcggcgcgctcggcatcttctgctacctgtcgggtaacgtgaaattcgcggaatacctgttgattccttatgtaccgggcgctggtgaactgatcgtgttctgcggcgcgctgatcggtgccggcctggggttcctgtggttcaacacctacccggcacaagtcttcatgggcgacgtcggcgcactggcgctgggcgcggccttgggcaccatcgcggtgatcgttcgccaggaaatcgtgctgttcatcatgggcggcgtgttcgtgatggaaaccctgtcggtggtcatccaggtcgcgtccttcaagttgaccgggcgccgcgtgttccgcatggcgccgattcaccaccactttgaactcaagggctggcctgagccacgcgtgattgtccgcttctggatcatcaccgtgattctggtactggtcggccttgccaccctgaaactgaggtagaaacgagtgtccctgatcgcttcagaccacttccgcatcgttgtcggcctcggcaagagcggcatgtccctggttcgcttcctggcgaaccggggcacgtcgtttgctgtggccgatacgcgggaaaatccaccggagctggtcacgctgcgccgtgactacccgcacgtggaagtgcgttgtggcgagctggatgtcgagtttctgtgccgtgccgatgagctctacgtgagcccgggcctggccctggcgacaccggccctgcaagcggcggcggcccgtggcgtgaagttgtccggcgatatcgacctgttcgcgcgcaacgcgaaggcaccgatcgtggccatcagcggttccaacgccaaaagcaccgtcaccaccctggtcggcgagatggcggcggcggcgggcaagcgtgtggctgtcggcggcaatcttggcgtgccggccctggacctgctcagcgacgacgtcgagctgtacgtgatggaattgtcgagcttccagttggaaaccacccacgacctgggcgccgaagtggcgacggtactgaacgtcagcgaagaccatatggaccgctacagcggcctgccggcttatcacctggccaagcaccggattttccgtggcgccaggcaatttgtcgtcaaccgtcaggatgccctgagccgtccgctgatgggcgagggcatgccctgctggacgttcggcctgggcaaaccggacttcaaaggcttcggcattcgtgaagagaacggcgagaaatacctggcgttcgaattccagaacctgatgccggtacgcgaactgaagatccgtggcgcacacaaccagtccaatgccctggcggccttggcgctcggtcacgcggttggcctgccattcgacgccatgctcgccagcctgcgcacctttgccgggcttgagcatcgctgccagtgggtgcgcgacctcaatggcgtcagctattacaacgactccaaagccaccaacgtcggtgcggccctggcggccatcgaaggcctgggtgccgatatcgacggcaagctggtgctgatcgccggtggtgatggcaagggtgccgacttcaaggaccttaaagcgccagtggccgcccattgccgcgccgtggtgctgatgggccgcgattcggacctgatcgccgccgccctcggtgacgctgtaccgcaagtacgcgcagcttccctggacgacgccattgcccagtgcaaagccctggcccagcccggcgatgcggtgttgctgtcgcccgcgtgcgccagcttcgacatgttcaagaactatgaagagcgcggccacctgttcgcccgcgccgtggaggctttggcatgagcctcaacctgagaaacatcatcaagccctacccgtcgccgatcattaccgggcgcggcattgaccttgatttccctatgctcgccggttgcctggcgctgctcggcctgggcctggtgatgatcacctcggcgtcctccgaagtggctgccgtgcagtcgggcaacacgctgtacatgatgatccgtcacctggtgtacctggtgatcggcctgggcgcctgcatcgtcaccatgatgatcccgattgccacctggcagcgtctgggttggctgatgctgatcggtgcgttcggcttgctggtcatggtgatcgtgccgggcattggccgcgaggtgaacggttcaatgcgctggatcggcttcggcgcgttcaacgtgcagccttcggaaatcgccaaggtgttcgtggtgatctacctcgccggttacctggtgcgccgccagaaagaagtacgcgaaagctggatgggcttcttcaagccgttcatcgtgctgctgcccatggctggcctgttgctgatggaacccgacttcggggccacggtggtgatgatgggcgccgccgccgcgatgctgttcctgggtggcgtcgggctgttccgcttcaccttgatggtggtgctggcggtcgcggcggtgaccatcctggtgcaggcgcagccctaccggatggcgcgtttgatcaccttcaccgacccctggtccgaccagttcggctccggctaccagttgacccaggcgctgatcgccttcggtcgcggcgagtggctgggcgtgggcctgggcaacagtgtgcagaagcagttctacctgccggaagcccacaccgacttcgtgttctcggtattggccgaggagttgggtgtggtgggatcgctgtgcaccgttgcgctgtttgtgttcgtttgcgtgcgcgccatgtacatcggcttgtgggccgagaaggccaagcagttcttcgctgcctacgtggcttatgggttggccttcctgtggatcggccagttcctgatcaacatcggcgtgaacgtcggcctgctgccgaccaagggcctgaccttgccgttcctcagttacggcggcagttcgttggtgatttgctgcgcctgtctcggcttgctgctacgtatcgagtgggagagtcgtacccacctgggcagcgaagagatggagttcagcgagagcgacttcgccgaggagccgacccatgggcgctaatgtgctgatcatggcaggcggcaccggggggcatgtgttcccggccctggcttgcgcccgtgaattccagaaccgtggctacaccgtgcactggctgggtacaccccgtggcatcgaaaacgaattggtgcctaatgccggcttgccgctgcatttgatcaacgtcaccggtttgcgtggcaagagcaagttgtccctgctcaaggcgccgttcgtgctgctcaaggcggtcatgcaggcgcgcaagatcattcgcgagctcaagccagtgtgtgtgctcggctttggcggttatgtgaccggccccggtggcgtcgcggcgaaactcgcgggcgtgccggtgatcgtccacgaacagaacgccgtcgccggtaccgccaaccgcctgctggtgccgttggctgcgcgggtgtgtgaagcctttccgaaaaccttcgccgcctccgacaagcttcgcaccaccggcaacccggtgcgtaccgaactgttcatggccattgcgcgtgacgcgctggcggggcgcaaggcacacctgctgatcctgggcggaagcctgggcgccgagcctctgaacaaattgctgcctgaagccgttgcgcaacttcctgaggatgtgcgcccggagatcttccaccaggccggcaagaaccacgatgaagtcaccgccgcgcgttatcgcgaggccggtgtagaggccaatgtacagcccttcatcaaagacatggcccaagcctatggctgggccgacctggtggtctgccgcgctggtgcgctgaccgtcagtgaactggcggccgccggtctgccgtccttgctggtgcctttgccccacgccatcgacgatcaccagacccgcaacgccgaatatttggccggggagggcgctgccttcctgctgccgcaaagaacgactggcgccgccgatttggccgctcgcctgaccgaggttttgatgcaaccggaacgactcaacagcatggcgagcaccgcaagccgcctggccaaacctgacgcaacccgtaccgtggtcgatatctgcctggaggtggcccatggttgagaatcagaaagccatgccgcaacccgagatgcgccgcatccgccgtattcacttcgtcggtatcggtggcgtgggcatgtgcgggattgccgaagtgttgctgaacctgggctaccaggtgtccggctcggacttgaaagagtcgccggtcactgatcgcctgaagtccttcggtgcgcagatctttatcggccaccgtgccgagaacgctgccgaggccgacgtgctggtggtgtccagtgccgtgaacacctccaacccggaagtggccactgcccttgaacgccgtattccagtggtgccgcgtgccgagatgctcgccgagctgatgcgctatcgccacggcatcgccgtcgccggtacccatggcaagaccaccaccaccagcctgatcgcctcggtgttcgccgccggtggcctggacccgaccttcgtcatcggtggccgcctgaatgcagctggcaccaatgcccagctcggcaccagccgctacctgatcgccgaagccgatgaaagtgacgcgagcttcctgcacctgcaaccgctggtcgccgtcgtcaccaacatcgacgaagaccacatggcgacctacgacggtgacttcaacaaattgaagaaaaccttcgtcgacttcctgcacaacctgccgttctacgggttggcggtggtgtgcctggacgacccggtggtgcgtgaaatcctgccccaggtcaagcgcccgaccgtgacctacggcttcagcgaagatgccgacgtgcgcgcaatcaatgtgcgccaggaaggcatgcaaaccttctttaccgtgctgcgccccgaccgcgagccgctggacgtgtcggtgaacatgccgggcaaccacaacgtgctgaactctttggcgaccatctgcattgctaccgatgaaggcgtcagcgatgaagccatcgtcgagggcctgtcgcgctttgccggtgtgggccgtcgcttccaggtttacggccaactgccggttgaaggcggtgacgtgatgctggtggacgactacggccaccacccgaccgaagtggcggccgtgatcaaggccgtgcgcggtggctggccggagcgccgcctggtgatggtgtaccagccgcaccgctacagccgcacccgcgacctgtacgacgatttcgtcaatgtactggccgatgccaacgtcctgttgctgatggaagtctacccggccggtgaagaaccgatcccgggcgctgacagccgcaagctgtgcaacagcatccgccagcgcggccagctggacccgatctacatcgagcgtggcgtggacctggcgcctatcgtcaagccgctgctgcgtgccggcgacatcctgctgtgccagggcgccggtgatatcggtggccttgcgcccaagttgctggcgagcccgctgtttgcagccgcggccaaggggaagttgaaatgatcactgactacggctccctgttttccacccttgcgcctgccgacttcggtcgcgtcgccgtgctgttcggcggcaagagcgccgagcgcgaagtgtcgctcaagtccggcaatgcggtgcttgaggcgctgcaaagtgctggcgtgaacgcgttcggtatcgatgtgggcgatgattttctcgcccgcctgcaggccgagaagatcgaccgtgcctttctcattcttcacggccgtggcggtgaagacggcagcatgcagggcctgctcgagtgcgccggcatcccttacaccggcagcggcatcctcgcctcggccttggcgatggacaagttgcgcaccaagcaggtgtggcacagcctgggcattccgaccccgcgtcacgccgtactgtgcagcgaagacgattgtatttctgcggccaaggaactgggcctgcctttgatcgtcaaacctgcccatgaaggctccagtatcggcatggccaaagtgaactcggccgccgaattgatcgacgcatggaaagcggcaagtacctacgattcgcaagtgttggtggaacagtggatttccggtcccgagtacaccatcgccaccctgcgtggccaggtattgccgcccatcgctttgggcacgccccacaccttttatgactacgacgccaagtacctggcttccgatactcagtaccggatcccatgcggcctcgaagcaaccaaggaacaagaattgatggacctcacggcgaaagcctgtgaggcgctgggtatcgccggttgggcgcgggcagacgtgatgcaggatgaccaagggaatttctggttccttgaagtcaacaccgcaccgggcatgaccgaccacagcctggttcccatggcagcccgtgccgccggtctggatttccagcagttagtgctggcgatcctggccgacagcattgagccaagaggctaaacacatgaacggcgcatcgcttcgtcatcagcccccacaagcaccgagccgcaagccggtgccacggggtgcaagccgaatggtggctaaagagccgatgtcttcgcgcctgccaaaagccaactttggttttatcaaggcgctgttctggccggtgctgctggtggtgttgggctttggtacgtacgaaggcgcgcagcgcctgttgccgtatgccgaccggccgatcaccaagatcagcgtgcagggcgatttgagctacatcagccagcaagcggtacagcagcgcatcggcccatacctggcggcgagcttctttaccatcgacctggcgggcatgcgctcggagctggaacagatgccgtggatcgcccacgccgaagttcgccgtgtatggccggaccaggtgacgatccgcctggaagaacaactgcccgtggcccgttggggcgatgaagcgctgttgaacaaccagggccaggcgttcaccccgcgtgagctggccaactatgaacacctgccgcagctgttcgggccgcagcgggcgcagcagcaagtgatgcagcagtaccaggccttgagccagatgctgcggccactgggcttctccattgcacgcctggaattgcgtgagcggggcagctggtttttgacgaccggggcaggcagttccggcccgggcatcgagttgttgctgggacgcgaccgcttggtggaaaagatgcgccgctttattgccatctatgaaaaaaccttgaaagaacagattacgaacattgcgagcgtcgacctgcgttacgccaacggcctggccgtcggctggcgtacaccggctgcgcccacggcagcacaacccgctgtcgcgaagaattaagaagaggcaggacccatggcaaacgtgcaaagcggcaaaatgatcgtcggtctcgatatcggcacctccaaggtggtggcgctggtgggcgaggtcggggaagacggcgcgatcgaaatcgtcggtattggcacgcatccgtcccggggcctgaagaagggcgtggtggtgaacatcgagtccaccgtgcaatcgatccagcgcgccatcgaagaagcgcagctgatggccggttgccggattcactcggcgttcgtcggcgtggccggcaaccacatccgcagcctgaactcccacggcatcgtggcgatccgcgaccgtgaagtcagctcggccgaccttgagcgcgtgctcgacgctgcccaggccgtggcgatcccggcggaccagcgcgtgctgcacaccctgccgcaggactacgtgatcgacaaccaggaaggcgtgcgcgagcccctgggcatgtcgggcgtgcgtctggaagccaaggttcacgtggtgacctgcgccgtcaacgccgcacagaacattgaaaaatgcgtgcgccgctgcggcctggaaatcgacgacatcattctcgagcagttggcctcggcctactcggtactcaccgacgacgaaaaagagctgggcgtgtgcctggtggatatcggcggcggcaccaccgacatcgcgatcttcaccgagggtgcgatccgtcacaccgcggtgatcccgattgccggcgaccaggtcaccaacgacatcgccatggcgttgcgcacaccgacccagtacgccgaagaaatcaagatccgctacgcctgcgccctggccaagctggccggtgccggcgagaccatcaaggtgccaagcgtgggtgaccgtccaccgcgcgagctgtcgcgccaggccctggccgaagtggtcgagccacgttacgacgagctgttcaccctgatccaggctgaactgcgccgcagcggctacgaagatttgatcccggccggcatcgtgctgaccggtggtacctcgaagatggaaggcgcggtcgagttggccgaagagatcttccacatgccggtgcgcctgggcgtgccccatggcgtgaaaggcctgggcgacgtagtgcgcaacccgatttattccaccggtgtgggcttgctgttgtacgggctgcaaaagcagaccgacggcatttccctgtcgggcccgagcatccgtgacagctaccgcagcgacgacgaggcgaaagcgccgttgttcgagcggctgcaggcttgggtaaaaggcaatttctaaagatttaccgcgacaccgcaacacccgcaacaagcagtaggcgaaaaaactagagaaaatgaaaggagagggaacatgttcgaactcgtagacaatatccccgctagcccggttatcaaagtaatcggtgtcggcggtggcggcggcaacgctgtcaaccacatggtcaagagcaacattgaaggcgttgagttcatctgcgccaacactgatgcccaggcgctcaaaagcatcggcgcgcggaccatcctgcaattgggcaccgcggtgaccaagggcctcggcgctggcgccaatccggaagtcggccgtcaagccgccctggaagaccgcgagcgtattgccgaagtgctgcaaggcaccaacatggtgttcatcaccaccggcatgggcggcggtaccggtaccggtgctgcaccgatcattgccgaagtggccaaggaaatggggattctgaccgttgctgtcgtgacgcgtccgttcccgttcgaaggccgcaagcgcatgcagatcgccgacgaaggtatccgtctgctgtctgaaagcgtcgactcgttgatcaccatccccaacgagaaactgctgaccatcctgggcaaggatgccagcctgctgtctgccttcgccaaggctgacgatgtactggccggtgccgttcgcggtatctccgacatcatcaagcgcccaggcatgatcaacgtcgactttgccgacgtacgtacggtcatgagcgaaatgggcatggcgatgatgggcactggctgcgccagcggtccgaaccgtgcacgcgaagccaccgaagcggccatccgcaacccgttgctcgaagacgttaacctgcaaggtgcacgcggcatcctggtgaacatcaccgccggtcccgacctgtccctgggtgagtactccgacgtgggtagcatcatcgaagccttcgcttccgagcacgccatggtcaaagtcggtaccgttatcgatccggacatgcgcgatgagctgcatgtaaccgtggttgccaccggcctgggtgcaaaaatcgagaagccagtgaaggtcatcgacaacaccctgcacaccagccaggccagccaggcagccgccgctccagcccctgctcgccaggaactgccgtcggtgaactaccgtgacctggaccgtccgaccgtgatgcgcaaccaggctcaggccggtgctgcggcgtcccgtagcccgaatccgcaagatgacctggactacctggacatcccggcattcctgcgtcgtcaggccgattaatggaatgtatcagggctatgaaggtgattggtgttcagcaaaggtctggtctgctattatcgccagcctttgttgataccagttcgcaatttgcgctgaagcggtccaagccatgattaaacaacgcaccctgaagaatattattcgtgccacaggtgtaggtctgcactccggggagaaggtatacctgaccctcaagcctgcacctgtcgacaccggcatcgtgtttgtgcgtgccgacctggaccctgtggtgcagattcctgctcgcgcggaaaacgttggcgaaaccactatgtcgaccacattggtcaacggtgacgtcaaagtggacacggtggagcacttgctctcggccatggctggcctgggcatcgataacgcctacgtcgagctctccgcgtccgaagtcccgatcatggatggcagcgctggccccttcgtattcttgattcaatctgccggcctggaagaacaggacgcagccaagaagttcattcgcattctgcgggaagtgacagtagaagacggcgacaagcgcgccaccttcgtcccgttcgaaggctttaaagtgagctttgagatcgatttcgatcacccggtattccgtgaccgcacccaaagtgcaagcgtggatttttccagcacttcgttcgtaaaagaagtcagccgcgcccgtacctttggtttcatgagtgacatcgagtacctgcgcaagcacaacctcgcactcggcggcagcgtggaaaacgccatcgtggtcgacgcggatggtgtactgaacgaagacggccttcgctatgaagacgaattcgtgaagcacaagatcctcgatgcaatcggtgacctctacctgctgggcaatagcctgataggcgagttcaaaggcttcaagtcgggccacgcccttaacaaccagctgctgcgcaagttgattgagcagacagacgcttgggaagtcgtgaccttcgaagatgccagcaccgcaccgatctcttacatgcgtcccgttgcggcggtgtaagtaacaactctctttctttagttttgaaaggctgccttcgggtggcctttttttatgcctgacgaatatccaaatgtgggagctggcttgcctgcgatagcggcctgccagttagcttataggtagctgacccaccgcgatcgcaggcaagccagctctcacaattgacctcatcagtttgaggtctttgaaacatccattgtccggttacggccgctgtgcttggcctgatacaacgcttggtcagccttgagcagcaggtcttcaagggaaatacggctgtgcttctgccaggtactcaggccgatgcttaaggtgatcggttgctcgtccccgaccactctcggcaagtgctggaccccctcgcggatatgctcggcgatcacccacgcccccttggcgtcggtattgggcagcaccaccgcgaattcttcaccgccgtaacgcgccgccaggtcggcagggcggcggatatggctggcgatcacctgtgcgactgtacgcaacgcctcatcgccgccctggtgaccatgacggtcgttgaaggccttgaagtggtccacatcgatcatcaacacgctcaacgactcggtcgagcgttgtgcccggtcccattccagccgcaagcgttcgtccagggtgcggcggttggccaggccggtaagggcgtcggtggctgccagttctgacagcacctgctcggcgcgatggcggcggcgcagctccatgcacagtgcccaggtcagccataacaagcccacgcacaacactccggtcgcgatgctgaccagccacgccgcacgtcgccagggtgcgaacatttcatcgctggacaaggccactgccacgatcagcggcaagtcgcccacattggaaaagctgtagagccgtgcctggcgatcgacgctggagatgctttggaagctgccgtcccgttcgcgcagcatgcgcgccacattcgggcgctggctcaggtccttatcgatgatgtccacttccagcaaaggctcttgcgcgagcaggatgccttggtggttgagcaggttgatggtgctgttgttgccgatgttcaagctgctgaacaactgatgaaagtacgacaggcgcatggaggcgaccgccacccccagaaaacgcccgtccgctgacgaaacgcgacggctgaacgcgatgcgccaggggtcgtcacactgacagcgggccatgaacgggcggctgatatacaagcccaggtcggggttgttgcggtgggcctgaaaatagtcacggtcggcaaagttacccagcttgggcgtaagcagggacgaatcggcaatcacctcgccggccgggtccaacagcaggatatcgcccttgtagggcgccgcagcggaacgatcgaacagcaccaaatgacggatgctctctgaaacatcttgcaggtcggtgcgctcggtggcgctgatcaagcctttgagggccatgtcgtaaagttcgacattgcgcagcacgtcagcgtcgatcaattgcgtgatggtattggcggtgcgcttggccgtctgcagggtgttggcatgttcacgaatcagcagcgcagtcacgaccccaacgatcagcaacaccgtgagcgtgctgcccaggatcagcaggcgctccgggcgcgtaaggcttgaattcatcgggcacacttttgcgttgagaatgcccttagcgtagtagcaacccttgaatatggctgtaggagcgagcttgctcgcgaaaaactcacagacgccgcgtttattcaggaagcacgcgttatcgttaacgtttttcgcgagcaagctcgctcctacctgtattcagaacacgttgatcgggtaatccacgatcacgcggtactcatccacatcgcggtccaccgccgagtagccattgctgccgcgattggtcgcccattgcaggcgcacggccaagtccttggccttgccgccctgcaccacatatttcaggtcgatatcgcgctcccagtgcttggcgtcctttccatcggcgctgtaccagttgctgtagccgcgactgttggggtcgaccttggtcaggtcggtcttgccgctgatgtacgacacggcggacgtcaggccgggcacgccgaggccggcaaaatcgtacgcgtacttgagcttccaggagcgctcgttgggcccgttgaaatccgagtactgctgggagttgtccaggtacacgctgtcgccctgggtgatgtagtcgaacggcgtgttgccattgacgcgctgataagtcgccgtgacgctgtggttgcccacccccacggtgaaatgcaggctgtaggtgttgttgtcgatatcgcccagcagtgattggccggtgtcctgagtgtggtagtagtgcaggccgggggtcaggctgaccaggtcgttcagggcgtaggtgtattccaggtcgtagtaatactggtgccagacgtccttgagttcggaggcgtacaggttgctggtcagcccctcaatcgcgctgaacgacacaccagcccagtccaggtgctggctgtcggtgttggcgggcagcgtgccgtagctggtgccgatgcgccgatggccgctctggttgtagagcttggtgaaactggcctgaccgccttcgaacatccagccgtcgaagctgtggttggtcaggctcacgccacggaaggtctgcggcaacatgcgcgtcatgccgccggcgatcaccgggttgttgaggagcaggtcgccggctttcagttcggtgtcgaaggcgcgcagcttcaaggtgccgccggccgtcgaaaacgaacccggcgccttgccgttgccgctgccatacggaaggatgctggagccatccgtaccgccaccgccgtcgagcttgaggccgagcatggcattgacgtccaggccgaagccgacggtgccctgggtgtagccggattcgaaagtgccgataaagccctggccccattccttgctgtcatcggtatgaatatcgcgccggtcgcggttcatgtagtagttgcgggtgttgatggtgaggtgggagccttcgacgaaaccgtcgttgggggtagtgtctgccgcgtgggccagtggggcgatcgttgctgcaatcgcgaggaataacggggtgaacgtcagcgagttcttcaccggtaaagctcctttggtcaatccataacggccagtgtcgtgagggtgtgcccggcctttttttacggcaaaaaaaagccgctgaaaatcagcggctttaagacagattcccagtgtagagccctggaaaaaagtcgagggaaattcgggtaagcgggtcagctgtctttgccaccgcgctcatcggtgcgtcaaagtaacgcaggcgagcgctgcgatacagagtgtaacaagataataactattgcccaaaccgcaacagtgcgagcgatgggatctcctgtgggagctggcttgcctgcgatgcagacacctcggtatgccaggcgcaccgaggtgatgctatcgcaggcaagccagctcccacatttttttggccgagttgtttagaccggaagggtaataccaaaggtattgccaccgccttcactgcgcacaaacacatcccccccatgcatcaacgcaatcgccttgacgatcgccagccccagcccgtgattggccccgctgttgctgcgcgaggcatccacccgatagaagcgttcgaacaggcgtggcaagtgttcgctggcaatggcctcgccggggttggtcacgccaatcgtcacttggtgtgcctgcacttgaatgtgcacgtcgatgacttgccccggcgcggtatgttgtacggcattgctcagcaggttgatcagtgcgcgccgcaggtgggctttttcgatctgcaccacggcatcgccgtgcacgtgcacttcgacctgggcgtcttcgaggatgaagtccaggtagtcgagggtggtggccacttcatcggccagggcgctttcgatcagcttggtggccttgctgccttggtcggcgctggcgaggaacagcatgtcattgatgatcgagcgcagccgttccagctcttccaggttcgattgcagcacctcgaaatagtgctctgccgaacggccgcgagtaagagccacctgggtctggccgatcagattggtgagcggcgaacgcagttcatgggcgacgtcggcgttgaacgattccaggcgcgaatacgcctgttcgacccggtcgagggtggcgttgaacgaattgacgaattggctcagttccggcggcaagggcgacaattgcaggcgcccggagagtttcggcggcgcaagtttttgcgcctcatccgagagtttgcccaggggcttgaggccgatacgcgcgacccagaaccccaacagtgccgccagtatgacgcccaccaatgccaggctgatcaacgccaccagcaagtgatgctgggtggcgcggaagttctccgtgtcgatggcaatcatgaagcgcagcgccgggcgctggtccttggcggcaaactggctgaccagcaccttgaacggataatcgtgaccgggcaagcgcaggtcgcgtttgcccgtggggccttcggcaaaggcgcgaatctgcgcatctggttcaccgtattcgtagctcgggtcactgctgaccacccagaaacggatgcgcttgtcttcttcccccaacagcttgagcttggacctgatcttggcccaatgctctggcgtgccgaagcgattgatcgacgattccagcacgctgtagcgcgcatccagctcggcacctggcaacagcccgaggccacggtccacctgctggtacagcgcgccgccgatcaacaggaagatcagcagcgccaccagggtgaacatgccgctcaggcgcagggcgatggaattagcgaccactgtggttttcctgcatgcggttctccagcacataacccatgccacgaatggtgtgcagcagcttgtgttcgaacggcccatcgagcttggcgcgcaggcgcttgatcgccacttcgaccacgttggcgtcgctgtcgaaattgatgtcccagaccatctcggcaatcgcggttttggacaggatctcgccctggcgccgcgccaatacgctgagcagcgagaactccttggcggtcaggtccaggcgcaggccgttgcggctggccttgcggctgatcaggtcgatccacaggtcagcgacggtgacctgcaccggttcatggccgccgctgcgacgggtcagggcttgcaggcgggccaccagttccaggaacgaaaacggcttgcccagataatcgtcggcgccttcgcgcaggccgcggatgcggtcttccacgcgctcgcgggcggtgagcatgatcaccggcgtctgcttgcgggcgcgtagggcgcgcaatacaccgaagccatccaggccgggcagcatcacgtcgagcacgatcaccgcgtaatcgttctccagcgccaggtgcaggccttcgatgccttcgcgggctacatcaacggtgtagccttgctcggtcaggccgcggtgcaggtagtccgcggttttttcttcatcttcaataatcaggacgcgcatgaccgcctcagtgtgtggtcgccagcgccagcgctggtttgggcctgtggaaaaaacgctcaaggtacaagtatatgaccggcgtggtgaacagcgtcagcgcctggctcaccagcaagccaccgaccaccgcgatgcctagcggctggcgcaactccgcccccgggccagcgccgagcatcaacggcactgcgccgagcaacgcggcaagggtggtcatgatgatcggccggaaccgtgtcacgcaggcttcataaatcgcatcttcgggcggcagcccgcgtacccgctgcgcctccaaggcgaagtcgatcatcaagataccgtttttcttcacgatgccgatcagcagcaccaggccgatcaaggccatgatcgaaaagtcctggcccagcagccacagcatgatcagcgcaccgaggcccgccgaaggcagggtggaaatgatcgtcagcgggtgcacaaaactctcatacagcacacccagaataatatagaccgctaccagcgccgcgaggatcagccagggttggctggccagcgagctctggaacgcctgggccgcaccctggaagttgccgatgattgtgctcggcatgccgatttcgttcttggcctggtcgagcatgatcaccgcatcgcccagggccacgccaggcgccaggttgaacgaaaggttggcggcggggaacatgccgtcatggctgatggacaaaggcccgactgtgggcgggtcgactttggccaaggccgacaacggcaccatctcgttggtcaatggcgagcgcaggtaaaaatagttgaggctttcggccttgccgcgctgttggctgtccagttcgagtatcacttggtactggttgatctcggtctggaactcgttgatctggcgctggccgaaggcgtcgtacagcgcctggtcgacatcggtggcggtcaggccgaagcgcgcagcggcctggcggtcgatgctgatgtgggtgatgctgccgcccagttgcaggtcgttggacaggtcgcgaaacgccgggttggcgcgcagtttttcggtgaggcgttgggtccaggtgttcagcgtcgggccgtcgttgctcttgagcacatattggtactgggcgcggctggggccggagctcaggttgatgtcctggccggcgcgcaggtacagcacgatgcccggcaccttcgccaactgcgggcggatgcggtcgatgaactggctggcggacacatcgcgctcgctgcggtctttcaaggcgatccagaagcggccgttggcgatggtctggttgctgccggtgacgccgaccgaatgggaaaacgcctgcaccgccgggtcggccttgacgatctcggccagggccttgtgcttggcgaccatgtccttgtacgacacgtcggccgccgcttcgctggtgccgagcacgaaaccggtgtcttgcaccgggaagaaccccttggggatgagcacatagccgaccaccgccagcgccagggtcaccacgaagatcgcggccatgctgcgttggtgcgccagggcacggcgcaggttgcgcgcatagccggccagcaggcgttcgctgaaggtgggcttggcatgggcagggtgggaaggggcgcgcatgaacaaggcggccagcgtcggtgccaatgtcagcgaaaccacgaccgaaatcagaatggtcgcggtggccgtcagcgcaaattccttgaacaaccgcccgaccacaccgcccatgaataacagcggaataaacgctgctaccagcgagaagctgatggacaccacggtaaagccaatttcgccggagcccttgatcgccgcttcgcgcttgcccaggccggcctccaggtgccgatggatgttctccaccaccacaatcgcatcgtccaccacgaagcccacggcgatcacgatagcgaccagggtcaggttgttcaggctgaaccccatcacgtacataagggcaaaactggccaccagcgagacacccagcaccgcagacacaatcagcgtcgccgacagttggcgcaggaacaacgccatcaccgccaccaccagcaggatggcgatcagcagggtcatctccacttcatgcagtgaggcgcggatggtcttggtacggtcggtcaacacgctgacctgcaccgaggccggcaacatgccttgcaggcgcggcagctcggcttgaatgcggtcgacagtgtcgacgatgttggcgccgggctggcgcgaaatcaccaggttcacccctggggtatcgccggaccaggcttgtacgtaggcgttttccgagccgttgataaccttggcgatatcgcgcagttgaaccggcgcaccgtccttgtaggaaacgatcagttggccgtattcctccgggtgaaacagctgatcgttggtcgacagggtggacacgctgttctcgccatagatcgcgcccttggccaggttgaggctcgactgctggatggccaggcgtatgtcggcgagggtcaggccgatggccgcgagcttttcaggggccgcttgcacgcggatcgccgggcgttgctggccggtgatgttgatctggccgacgccgtcgatctggctgatctggcgcgccagcagggtttccacgtagtcgctcagctcggtgctgggcatgctgctggaactgacgctgaggatcagcaccgggctgtccgccgggttgaccttcctccaggtaggcaagctcggcatgtcgctgggcagcttgccggacgcggtgttgatcgcggcctgcacttcctgggcggcggtatcgatgcttttttccagggtgaattgcagggtcaagaggctggagcccaaggcgctgctggaggtcatctgggtcatgccggggatggcactgaactgcacctccagaggcgtggccaccgatgaggccatggtgtccgggctggcgccgggcagttgcgcggtgacctgaatcgtcgggaattccgcttccggcagtggcgcgacggccaggttcgggaaggcaatgatccccagcagcaccagggcgaaagtcagcagcaaggtggcgaccgggtgatcaacgcaccaggccgagggcgaccggctggcgctcatggttgcacctgggcgttggcggtgtggatcacttgcggcggctccttgagcaccgtcacctgggcgccggccttgagccgcgactgcccatcgctgaccagcacatcgccggcctgcacgcctttgatgatattgatgtcgctgttctggtaggcgacctgcaccggcaccacctcggctttgtcagcgcttacgcggtacacgaaatgtgagtccaggccgcgctgcaccacggtcggcggtaccaccagggcgttcttgtcgagggccgtctggatcttgatggtcaccaattgccccggccatagcttatgcgccgggttgctgaactcggccttggcccgcagggtgccggtggtggagctgatctggttgtcgatcaggctcaggtggccttcgccgagcaggtcgccggtctggccatcggtgtcggcgcccaggtaggcgtcgacggtggcccgggtgggggcggcgatcaggccctgcaaggttggcagcatctgctgtggcaaggaaaactcaacggcaatcgggtcgagctgggtgacggtaaacagccccagggtatcgctcatgcgcaggaaattaccttcgtccacattgcggatgcccactcggccgctgaccggggagcgaatctgggtataggaaagttgtacctgagccgcatcgatggccgcttgattaccttgcgccgtggccttgagctggttgaccagcgcctgttgctggtcgtaggtctgcttcgacacaccgtcgtcgatgctcagcgctttgtagcgcttgaggttgaccaatgctacttgcaactgcgcctggctttcaccgagttgcgccctggcctggtcgaggctggcgcggatcgagcggtcatcgatggtagccagcaggtcaccggccttcaccgattggccttccttgaccagcagttgggtgaggatgccgtcgatttgcggacgaatcaccacgctgtgcaatgacaacaccgagccgatgccgctgacaaaccgaggcacatcctgttgcgtcacgctcaccacccgcacaggaatggcggtaggcgctgccaggcgggccttggccggccgggttaacgcccaggctgcaacggccagtatcaggagagcacccagcatcagggccacgtttcgtttgatctgcataggaggacgccggcgcaaactgcaagttggagttcggaacgtcctttatagcgctgttccgccgtcagcacggtgacggcaaactgacagccgtgacagctaggccatgtgagcttgtcgcttgaagttactgctggcagctcaggccccgtatactcgcgcttttacacctattagctgtgccggagcccttatgacttccccaacccaacccgctgtcgacgcggccgaactcgtcgatccggctaccgccgacggcgttgaaaaagccgagatcccggcgttcaagttccccttcaagccgggtgagctggccggtgccaagaatgccagccagccctggtacaaaggcggcgccaagaacgggcataccaagacgccaggcatggcgcctccgggcactcgccgctcgatgggtaaacgctgagattaaagcgttgcgtgcgttataggcagttgcctacatcgcccgtggacatttctgcttgtaggtccgcgaccgattcttgaaagcttgcacagcgtttgcttcgtcccgatgacgcccatcgggacgtggtgagtcagctttccggaaaaggacattcccgtggccctgatacacctctgtgcagtgcttgctctcttgctctcgacgagtgccgtcgccgccgacgttcaacctcggcgtgaaatccgtttcgccgttgccgcgcattttccgccctttcaaagccgcaacgcccaagggcaattggtggggctgaatatcgaactgggcaatgccctgtgcgagcagctcaacgtgcgctgtacctgggttgaccaggtcgtgatggaaaactttccggcccttgaagccaggcagttcgacgcgatcatgggcatggcgcccacctgcagtcggcggcgacgggtgagttttaccgatgacctctacccgatcaccactcggctggtggcgcgtaaaacctcgggcctgcgccctgatcggcgctcgctcaggggcaagcgtgtcggggtgctggtgcgcagtaatcgcgaagcctttgccctgtcgaagtgggcgccggcgggagtgatcatcaggagtttctggctcaacgaccaactggtgcagggcctggtttcgggcgatatcgacgcgaccctgcaaggcgcggtggagatccgtgaagccctgctcgacacgccccaggggctggacttcgattacatggggccgcctgtgtcgtcgggcctgctgggtaatagcgtggcgattgcggtgcgaaaaaccgatacggcgttgcgtaatgagcttaatcatgcgcttgagcaattgatgcagaatggcgagtaccagcgcattcttcagccgtatcggctcgatgtattgccgccccattcatgatcgcgaatgtgtgagtgccgctctgcacccgtgaggcgcctatctacctgacaccccgcagtccaaatgtgggagctggcttgcctgcgatgacggcctcccagtcgacacagttggattgtgtacatatccattcctgcggtaacggccacttggggttccgctctgacagcggctcacttttgaaaagagccggaatgccggcccagccaaaagtaagcaaaaggctcttgccccaccactcggcacctcgctcaggctcggtgtgcccgtaattcgccnnnnnnnnnnnnnnnnnnnnnnnnnnnnnnnnnnnnnnnncatccatggcgcggggcggctaaaccggcatccctgccggtttaccccccaaatcactgtcgaattccggccagcgtggtttaacggggcgcttgagatcaaaagcagatcaagagcggctcgcttcgcatcgtggttagtcgggttgctgcgaactataattgggtcattctctatgccgccaggccgcagtggcctaagccgctctcagcgagataaacgcataattggccggcacttccgtggcaatttctgccccggcatccagcacctgttcggcgatgtccatcccggacacatgaaacacccattcattggccaccgccggctgttcaatcgccagttcaatcgcctgggcaaacgcctgcatgtccggcaagtacgcggtaaacccgtcgcccttgagggcggtcgtgcggatgccgagcaacgcgcatacggcttccttggtctgcacatcatcccgatcggcctggcgcgaacggcgaatcagttcggccagttgcgcgtccatcaattcaccaccgacgatcagcgccgggccttgttcccaggattccggcgggcagtctttggcgcctgggttcagcgggatatgcgggtttatttccatcgggtagatgcggcacaccagcgggcgccgttcgtagatgcggcagcggttgtcttcgtcaagattccggcagcgtccggcgttgtaggcggcaaaggtgattgccacaaatgcctcggtagtgccgctgggcacgatcactgaacggcgttcggcgtgttcccgttgttgcaggggcaggcccaggccgttgccaagaaagccctccaccagaacgatgacgttgccgccgtccgccgcccagctgcgggcttcttcgagggtcaggggcacgtgatggtcgctgcagcatttgccgcaaccgacgcaggaaaagtgtgtgttcatggcggatctgtcaccaggcaaggtcagagggcacgctgaggggtgacgggtttttacctctatcgaccgctcaggggctctggaagcaagttatgcgccagtgagggtcagcccttggataggatgtcgcgcagcacaaactccatgcccgcactttcatacaggtgccgggcgcgcaggttgctctccagcaccttgaggtccacatagggttcgccgcgctgcttgaacacctggaagctgtgcagcagcaaggcgcggcccagcccttggccttgggcacaggggtggacggccaggttcttgataaaggcgctggtccagcattgcgccaccgcgagaataccgccgcggttactggccaccaggcacagcgtcgggtcgtactcggcatcggtgacgaactgccggcgccactcctccaggtggccgacacggccgccgccctggtcctgggtcatgcgcagcacggcatggatcgccggggccagttcatcgcgataatgatccagccgggtatccgctggccactgcggggcgggcaggctgccggtgaggtcgcgacgcaggagctggtaatactcggccaaggcttacaggcccttttgcgccacggtttgcgcggcgatgaccaggcacttggtcaactctggggatgagaacttggtgagtaccgagtcggcaccggccaggcgtgctttttcgctgttcatcgcgctgtccaacgaggtgtgcaacagcacgtagaggtccttgaaatccggggtttcgcgcaaggtgcgggtgagggcgtagccgtccatctcagacatttcgatgtccgacaccaccacgttgatctgttcaaccgtgccttgcagctccagcaacacgtcgatggcttccttggcgctgcgggcggtgtggcaggtcaggccgaggttgcgcagggtgtgtaccgattgctgcaaggccacctggctgtcgtccaccaccaggatgcgggcattgcccagcacttcggcttcttccatggtcaggtcggtcggcgccgcttcaaccggtgccggggcgatgccatggatgactttctcgatatccagcacctgcaccaggccaccttccacctgggtaaccccggtgataaacgcccgattgccgccggagccgtagggcggcgggcggatatcggtagtcaggcaatgcacgattttgctcaccgcctgcacatgcaggccctgcttggaacggctgacatcggtgacgatcaggcagccgccgtccgggtcttgcaagggcatttcacccagggcgcggctcaagtcgatcaccgacaacgaagcgccgcgcaaggtggcgatgcctttgacgtgcgggtgagactccggcagcctggtcaatggcgggcaggggatgatctcgctgactttcaacaggttgatggccatcagcttgccgctgcgcaaggtaaagagcagaagcgagagtgagtctgcgcgggctttggtggtggacataaaaaccttctgtggatcagggatgacgatctatagagagttatcgacttggctggccggggctttaaccggattttgtgtcggccactgtttatgtgcaagctggcttgcctgcgatggccataggtatctacacaactgtgcagttcgccgcagccaccggtaaccaggatgcgaagcgagccgctcttgatcttgatctgcttttgatctcaggcgccccgttaaaccacgctggcnnnnnnnnnnnnnnnnnnnnnnnnnnnnnnnnnnnnnnnnattacgggcacaccgagcctaagcgaggtgccgagtggtggggcaagagcccttttggttacttttggctgggccggcattccgggctcttttccaaaagtgacccgctgtcagagcggaaccctaagcggccgttaccgcagcaatggatatgtacacaatccaaccgtgttgactgccagcccgccttcgcgagcaagcccgctcccacagttggatcgtggggtatcaggtagataggcgtcggctggtaggccgtcatcgcaggcaagccagctcccacattaattccagtatcagcccttccagacctgcgggttcaccaggtcctgcgggcgttgacccagcagcgcgctgcgcaggttgtccaatgcgcgattggccatggcttcgcgggtttcaccggtggccgaaccaatatgcggcagggtcacggcattgctcaactggaacagcggcgattcagccagcggttccttttcatacacatccagcccggcaccacgaatgcgttgggtttgcagggcttcgaccagcgccggttcatccaccaccggcccacgggagacattgatcaggatcgcgctgggcttcatcaacgccagctcccgggtgctgatcaggtgacgggtcttgtcgctcaacggcaccaccaggcaaacgaaatccgcctcggccagcagctgatccaggctgcaaaactgcgcgcccagttcttgctccagcgcggtcttgcggctgttgccgctgtaaaggatcggcatattgaagcccaggcgcccacgccgggccacggctgcgccaatattgcccatgccgacaatgcccagggtcttgccgtgcacatcgcaaccaaacagcggcgcgcccacgctggctttccattggccggccttggtccaggcatccaattcggccacgcgccgtgcgctgctcatcagcaacgcaaaggccaggtcggcagtgctttcggtgagtacatcgggggtgttggtgagcatgatcccgcgctcgttgaagtacggcacgtcgtagttgtcgtagcctaccgacacgctggacaccacctccagcttgctcgcgctttcaagctgctcgcggcccagcttgcggcccacgccgatcaaaccatgggcatggggcagggcttcgttgaactgtgcgttgatgtcacccagcttggggttgggcgcgattacctcgaaatcctgttgcaggcgttcgatcatcggtggggtgatacggctgaaggccaggacagtctttttcatggcaggcgggctcatcgactacggaagaatgctgagcacgctaacattcccgctaacagttttgcagggttttaaccgctaacactgctgtttcattggtttgaatgcctgtcaactgtgaaaagtacgggctgttcggtcaatacgtaagctcctattcttgttttcaaggccggtgtttatgccttcttagataggagatcaatcttatgaatatcgacgatgagataaagcgagtcagggatttggtagccgctggtaaaacaagcagcgagcctcacgaggctttgccgaaggcacccacgattgagttgatcgtgaatggtgagttgtatgtcgatcaagtacctgagatcgggctgaaggttggggtggattacgacactatgcagacgggtcagaagttcgtattgcatctgttcagcaatacgccttcggatggcgactatcgaagcgagcccgttacggtgaacgaggtgaaaccttacgttgttaccgtgcccaaggaaaatattgaaaaaatgcataaaaacgagcttggtctttgtctttatttcatcgacgacaaagaaacctctaactggacgacctttacagtccggtgacacctcctatcaaggcacacggtgacctgctcaaataacaggtcaccgcatacgtggctcaattactcaagcgagcaccacccaaaccaccgctcaactcatatgccaccaactccgcctggtgcgccgccagaatctccggcaacgaaccgcgcaggtattccacccacgtcttgatcttcgcatccaggtattggcgcgaggggtagatggcgtacaggttcagctcctgggagcggtaggtcggcatcacccgtaccagtgtgccgttgcgcagcccttcgatggcggcgtacaccggcagcaggccgacgcccatgccgctggtgatcgcggttttcattgcgtcggccgagttcaccaggaacggcgagctgttgatcgccacgctttcctggccttcagggccgttgaaagtccatttgtccagctggaccaccgggctgaccaggcgcaggcacgcgtggttgagcaagtcctgggggcgttgcgcgcagcccttggccttgacgtagtccggcgaggcgcaggcgatgctataggtgatgcccaggcgctgggacacgaaacctgagtctggcagttcgctggccagcacgatggacacgtcgtagccctcgtcgagcaggtccggcacgcggttggccagggtcaggtcgaaggtcacgtcgggatgggtgcggcggtagcgggcaatcgcatcaatgacgaaatgctggccgatgccggtcatggtgtgcactttcaactgcccggccgggcgcgcgtgggcgtcgctggcttcggcctcggcttcctcgacgtaggcgaggatctgctcgcagcgcagcaaatagcgtttgccggcttcggtcagcgcgatgcgccgggtggtgcggttgagcaagcgggtttgcaggtgggcctcaaggttggagaccgcgcgcgagacgttggccgtggtggtgtccagttgcacggcggcggcggtgaagctgccggcttcggccacacaactgaaggcgcgcatgttttgcaaagtgtccatggagtgttctcaagggagatagcaaattgtgacagaaagttacgctttgagtgatccctaccaacggattatcgcctgaacggtaacaaagattcacaggaataccagcttatcgtcctccctggcgccgcctagaattgcgccacctcttgcgcaacaccctctcaggaattcgcttgccgtgccgcgtcgcatcagcagagagctgaagactctcagtgtttgggctttaacgtcagtcatcagcggttgcatcggaaccggaggaatcgccccccaaggccaggcgatcaacgccaataccctggccaccgatgtcgcgatccagagcgcggcccgcgacgcccactggcccaccgcccaatggtggcaggcctacggcgacccgcagctcaaccgttgggtcgagctcgccacccataacagccccagcctggccgtggccgccgcccgtgtgcgccaagcccgggcgctggccggggtggccgagtcggccgagtcgctgcagatcaacagcgacaccaccctcaagcgccataactggccgaaggatcagttctacggccccggcgaattgagcggcgccaacacctgggacaacaattcgtccctgggcctgagctacgccctcgacctgtggggccgggaaagcaacacgaccgaacgcgccgtcgacctggcgcacatgagtgccgccgaagcgcgcctggcccagctcgaactgcaaaacaacgtagtgcgcgcctatatccagctgtcgttgcagtacgccaaccgtgacatcgcggccgctaccctggcccagcaacagcagatcttggacctggccaacaaacgcctggccgccgggatcggcactcactttgacgtcagccaggccgaaaccccgctgccggagacccatcgccaactggatgccctggacgaggaaatcgccctgagccgcaaccaattggcggcgttggccggcaaaggcccgggggagggcgcgcagttgcagcgcccgaccctggccctcgccgcgccgttgaaattaccctccagcctgcccgcgcagttgctcggccaacgccctgacgtggttgccagtcgctggcaggttgcggcccaggcacggggcattgatgtagcccacgccgggttctaccccaacgtcgacctggtcggcagcctcgggtacatggccactggcggcggcatgctggaatttctggccggcaagaaattcaactacaacgtcggcccggcgattaccttgccgatcttcgatggcggccgtctgcgtgcgcaattgggtgaagccagtgccggctatgacatcgcggtggcccagtacaaccagaccctggtcaatgcgctcaagggcatcagcgaccagttgatccgtcgcgagtccatggacaagcaatcggccttcgccgcgcagtcagtggcctcggcgcagaaaacctacgacatcgccatgatcgcctatcagcgtggcctcactgactacctcaacgtgctcaacgcccaaaccttgttgtttcgccagcagcagatcgaacaacaggtgcaggcggcgcgcttgagcgcccatgcggaattggtgaccgccctgggcggcggcctcggcgctggcgacgatgtgcccacggctgccaagacacgcccaagcaagaccccggcggcgctcgccgtgtttgatcactgagtaggccttcatgactcccttgcctacaccgctgcgctggctgcattcccttgagtggcgccgtggtttcttcgactgggcacgcagcgatggcgtgacctgggtgtatatcttcaaagtgctggtcgccgcattcctgacgctgtggctggccatgcgcctggaactgccgcaaccgcgcaccgcgatgatcaccgtatttatcgtgatgcagccccagagcggccaggtgttcgccaagagtttctaccgtttcctcgggactttggcaggctcggcggtgatggtgctgttgatcgccttgtttgcgcagaacaccgaactgttcctcggtgcgctggcgatctgggtgggcatttgcaccgctggcgccacacgcaatcgcaactttcgcgcctatgggtttgtgctcgccggctacaccgcggcgatggtcggcctgccggccctggcccacccggacggcgccttcatggcggcggtgtggcgggtgttggaaatttccctggggatactgtgctcgacgctggtcagcgccgccatcctgccgcagacctccagcgccgccatgcgcaacgcgttgtaccagcgctttggtgtgttcgcgctgtttgtgacggacggcctgcgcgggcgcagccagcgcgaaggcttcgaggccagcaacgtgcgctttattgccgaagccgtgggcctggaaggcttgcgcagcgtcaccgtgttcgaagacccgcacatgcgtcgacgcaatgggcggctcagtcgcctcaacagcgaattcatgagcatcaccacacgcttcaacgccttgcaccagttgctggaacgcttgcgcgccgatgaggccgaccatgtggtggcagcgatcaagcccggcctgcaagacctggccgaagtgctcgacagcttctctggccgcgccctcaccagccccgatgccgcgcgcctggtcaaccaactgagcgcctacaaggatggcctgcccgccaaggtgcgcagcctgcgggcgagctttcaggaggacaacccgacggacgccgagcagttggatttccacaccgcctacgagctgctgtatcgcttcgtcgacgacctgcacaactacgcacaaacccacgcgtccctggccgagcatcgccatgcgcgggaggactggcacgaagcctacacgccaaagaccaattggctggcctgtgccgctgccggtgtgcgcgcctcgtttatcctggttgtgctgggcagttactgggtggccacggcctggcccagcggcgccaccatgaccctgatcgcggcggccacggtgggcttgtccgccgccacgcccaaccccaagcgcatggcgttccagatggcctgcggcaccttgatcggcgccttggtcggctttgtcgaaatgttcttcgtgttcccctggatcgatggcttcccgttgctgtgcgtgatgctcgcgccggtgatcatctttggtgcctttctgtcttcacgcccgcgatatgccggtgtgggcgtaggcctgctgatcttcttcagcaccggttcggtgccggacaacctcacggtctacaacccctacacctttatcaacgactacatcgccatggtcatcggcatgctggtgtgcgcggcggcgggggcgatcattctgccgcccaatagccgctggttgtggcgccgcctggaacaagacctgcgtgagcaagtggtgtatgccatcagcggcaagctcaagggcctggcgtcgagctttgaaagccgcacccgcgacctgctgcaccaggcgtatggcctcgcggccggccagccgcaggtgcagcgcgatttgctgcgctggatgttcgtggtgctggaggtcggccacgcgatcatcgagctgcgcaaggagcaggcgattttgccggtgcacccggcgtatgccgagtcccagccgtggcgccaggcgatccgtgtgatggggcgctcgctggtgcggctgttcctgcaacccagcgccagcaacctggagcgcgggttgattgccgtcgaccatgcgatcagccgcgtgcaggccaccgacgaacccttcgccccgcacttcgacacctcggccctgcgccgggtgaagagctacctgcactttattcgcacctcgttgctggacccgcaatcgcctctggccgccctcaaaggagccccgaatgcctcgtgaaattgcattccacggcatctatatgccgaccatgaccctgatgttcctgatcgccgcggggctggcctgggcggttgaccgcttcctggccgggttcgacctgtatcggtttttctggcacccggcgctgctgcgcctgagcctgttcgcttgcctgttcggcgccctggcgctgagcgtctaccgttgagaatgccccgatgaaaaagttcttcagcctgctcgccaccttgctggttctggcgttggcgatctggattggccgcacgttgtgggtgcactacatgcaaacgccgtggacccgcgatggccgggtgcgcgccgacattatcaatgtggcggctgacgtcaccggtgaagtggtggacgtgccggtacgtgataaccagttggtgaaaaaaggcgacctgctgatgcagatcgaccccgagcactaccgcattgccgtcaagcaagcgcaatcgttggtggcctcacgcaaggccacctgggaaatgcgcaaggtcaacgctcaccgccgtgccgacctggacgccctggtgatctccaaggagaaccgcgacgacgccagcaacatcgccgactcggccctggccgattatcagcacgccctggcgcaactggaggccgccgaactcaacttgaagcgcacacgagtgctggcggcggtggacggctacgtcaccaacctcaatgtgcatcgcggcgactatgcgcgtattggcgaggcgaagatggctgtggtggatatgaattcgttctgggtctacggcttctttgaagaaaccaaactgccccatgtgaaggtgggtgacacagccgatatgcaattgatgagcggcgagaccttgaagggccatgtggaaagcatctcgcgcggtatttacgaccgcgataaccccgagagccgagaactgatcgccgatgtaaacccgaccttcaactgggtgcggttggcccagcgtgtgccggtgcggattcacattgatgaagtgccggaaggcgtgctgttggcggccgggattacctgcacggtgattgtaaaatcggcgccaaactgaacagtgggactaagggaatggcgcatttgccctgattttgcgccgacgctttaccctcaacatgctggtgtatcggcgatgactcttcgaatttaggatcaggatgtagagcagggatgtgatcagaggggataagttgagcagtgtcgctgggtgactagctagatagcttatcgcgagcaggatattcacgatggcgataggtatgagtattcgaggcgcatgcctgaatccttcacacaacatcacttggcctacaaaaaaaatcagacaaagtgccataccggttccgaacgaaaactcagtcggtagatgattggcttttgcgtagtacgacaggctgagcgccatgtttatagcaatattgttcaggccaagcagcagagcgctaccgaatgacggtaagaatcgataggcgtaacggcgccaaattcgatattcacggaagggatcgacgctataagtcatattctgagagttcttcatacagggcgatgattatgtggttgatgtttccgaaaaaggtgctgctaccaatggccaaagtagctcccacttggtcttttatttgagtgagaatgcccaaacgcaattgggggttgattaattcgttggtggttctccaggaactatttgcacactgcaaggcgctggcagccgtagcgctgtaagcaatgtaggtcacggtcagactggtccccccactgaatggcgctgccgcgattcccgttttcgcaatgatgaagccaaccactgcccctgcgcaggaagtcgccagccccgatgcttcccgccatagctgagattcacgaggcgaattcgccgtcaactctgcatagtcatcggcagtcatcactggctccgctatctcccgcagaatcacccgcttgggtctgatactgcacagcggtacaaactcacgcagcaccgtcacctgataatcactgccgatatgcactacgccggcgccgacgatggccgggtcagcgtcaatggttctatagagtttgggcaggtccagcagactgattagccgctggcgagtcgtggtgtgcgcatccggcacaccgcttctcaggaaatggctgggcatcctttcacctgtgcttaagcagaggtgaaagagcctggggatagcttccttggaatgatgtcaggccgttcgctgttttttgtaggaagcggctgggcggttatctcatggcgctacaaaagtctcgtgcaagtggcgccacaacagcgcaccactggcctgcttttcgaataccacggtagcgcggcggtcggtctgggtgccgctgtcgtcaatctgatgctcgcgatacgtgaccgtggcaccgcgtgcgtggcggtcgataccggtcatttcactcagggtgattttcagccctggacgcatcccgcccaggcgggtgaatagtgcaatgacacccgccgtattcactcgtgtgccagtcgcaggggcgatcatgctgaactcgggtgagaagcgcgcgagcaaactctccaacgtcccgggaggcgcaaccccagcaaaccattgctcgatctcgacgtgggtgtggatcacttcttcaaaaaaatcactgtagtcaatcatggtcaggctcgctggaggggtgaagcagtgcgcgtaccctggaggtatccaggcgcagcacggcgaaaagtggcaacagcgtcaaggctgccgccatcgtgaaggttatggcaaaggaatccaaggccgacagcattgcgctgagcacggcggcgccgacgcagaagctcacttggcggttgatattccacagggcgctggcatggcccatgcgctcggcggggatgtcgagaaaggccagggtttgcgcggtgctgctgcacaggctgccgcccaggcccatcagcgcgtaggccgcaatgatcagggcgggttcgttgagcaacaggatgccagcaccttgcagcgccatgcccgccagcagcaagggtttggggccgtagcgattgaagcgtttcttgctcaggtagattgccactgccgaggccagcgcccagggcagcatcagcgcgccggtctgggtggcgtcatagcccaggctgcgcacataaaggatggcgatcaggctggtgccgataaacacgccggggacacacaggtacaccagcatcgccacgcgcagcatcgggctggcgacttgtttgaacacagcgcccaagtccaagggcggacgcacgctcgcaggcgcgtcgggctttatccacagcaaggccagcagcagggtgatcatggccaggggcaggttggtgtagaaaatccagcgccatgaaacactgtcgacaatcaccccacccaacgctggcgatagcgccggcaccagcaacgccaccgacatcacccgcgccgtcaactggctgcgctcggcggcgggaaagtgacggtacgccatggcttgccccacgggaatcagcaagccgccgccaagcccttgcactgcgcgccagccaatcaacgcctcgatggacccggcctggcccaccatcactgaggcaccggcgaacagcagcaggctggtggcgatcagcgtgcgttcgcccatcatcgccgccaaccacacactcaagggaatgatcagggtcagcccgagcatgtaggcgttgctgatccacgccagttgcgtgaccgagacgtgcagctcgcgggcgatgtccgggtaggcgacggtggcgacaaacatgtttaccaggtccagggcaaaacccaataaaaagatccaggcgacttttgaacggtaggtcatgaacgcgatcctgcgagtgaggccggcagggtaggccgcacgcagggtttgggatacgccggtttgcctgctagtttgtcaaaaatattttgacaaaggagggcgtccaccatggtcagcctggaccgttttgacaccttcaaggccgtggtcgaggccggttcgctcacctccgctgcggacctgctgggccagactcgcgccgtggtcagcttcaacctcaagcgtctggaggcggaacttggcgtcaccctgctgacccgcaacactcgtcagttggcgctcaccgatgccggcgaacgcttctacctgcgctgcacacgcatgcttgaagaggcccgcctggcggtagaggaagcccgcagtgagcatgcccaactcaaaggcaccctgcgtatcaccaccaccgtggaatatgccctggctgtggtcgccccggcggtagaagcctttcgccgcctgcacccggacctgaacatccacttatccacatcttccacccacgccgacctgatctccgagcgttttgacgtggcaatacggctggggcgcttgatggactccaatcatcgcgccgtgcagttatcgacgttcgaggtgtttgccgtcgcggcgccgcagtttgccgcagttcaaactctggctgagttggagcagctgcccaggctgggccatggccgcttgaccgagctgagcgtcaccgacccggcaggtcgcgaacacccttatcgggccggcccgtccgcgttggtggccgacagcgcgtcggtcctccaggcgtttgccgtgcggggccacggtgtggcggttttaccgcaatggctggtgcaggaggatctggacgcgggacgcttggtgcgcctgttggcggaccatcgctttgccccgcaaggggtttacgcgatgtacccggacacgcggcatttaccgctgaaggtgcgggcgtttattgatttcatgaagccttagagcgtaccgcccaagccaaaacgcttcctcaacaccttctccaacaaccccttgggcaccagcgccgccatcaacggcagcgcccggctgccgttgcccgagcgcagcagacgcggtggttgcccttgctgcaccgccttgagcacgtctgcggcaaattcactggctggggttggcttgtcctgggatgcttggctacgtgcacgaatgccctcgcgcaacggccaccatggcgactgttcgtggatcagcaattcggcctgggcgccggcattcttggcaaagctggtattgatcgcaccgggctgcacttccatcacgcgcacgccaaacggtgccagctccatgcgcagggcgtcgctcaacgcatgcacagcggctttggatgcgcaataggcgccggcgaacggcgtcaccaatacgccggaaacgctgccgatattcaccaccaggcccttgctgcgacgcaaggccggaaatagcgcctgggtcacaccgacgatggaaaacacattggtttcgaattggcgttgcatcgcctcggtaccgccgtcgagcaacgggcccatggcgccgtagccagcgttgttgaccagtacatctagctcgctcaattgctcggccaggagttgtaaagcggcgcagtcattgacgtccaactgcacagcattgaagcctgcggccgcgagggcggcgacgtcatcgggttggcgggcgctggcccatacctcaaagcctgcggctttgaacgcatcggcaagggcgcggccgatgccgctggagcaaccggtgatcagtacgttgggcatgggtccatcctttgtcagtccgagaaactgccttgcaggtgctcggcgcgaaattccagggtttgtgggcgatagccagggcgcagcggcggggtgggcaggcagtcttcccaggtggcgcccgcctgcaactcgccggggccgcgatagcgtggggcggcgtagacgttgtcggccaggttgaccgtatcgcccggtgcataggcggcgacgcgccagcgcagttcggtgagcggtacgtcgttgccgttgttgagggtcagtttgagcggtcggtcggcggggcagtcttgcggggcatagctgatacgcagctcaaggcgtgccagttgcgacgcttcgcggttgtccagccataccacccacactgcgacaaaccccaggccgacggcagcggccaacgataccggcagcgccttggccgggtagcgcagcagcaggaccagccaggtgatgatcaggagaacgccgaagaacatggaggccacctcaagtaagtaaccagcatcctaacttaagcttaggtgggattggctaccttgagcgatgtgttgggactggatgacgtcatcgcaagcaagacaatcgagtggcagcatcgttttttgacataaacctaaataagtttttatcgcgtttttttgtatgaatcgacactcaggacgcacttaaacctgtcggaacgattacatcgacaagcccaagtcccagtcatcttgcgtgagatagaaacccatgatcacccttgcttccagtccgtccttcgtgcaaccgccgcggcttcctacaacgcccttggcgccggtggtaccaccggcaatgggccacgaagacactcaaccctattcgccatcgaatgcgcgcgggttacctcggcttcgacgcagtactgaattggaaaaccctgctactggcgacgcgtcgcttatcgccgggcagcccctcagttattggcaagagctgacggggaacatccagaacaactatcgcttggtcggggcgttgcagcaaattcacgatgccttggtcaaggagtcgaatctggatattacgacgttgttggaaacgaaaaagttttccgttcatgagtattccgcattcgcgcgcgcctatggaattgaagcgggcgatgaagattcggttgcctggttcttgcgggaaaatcagttgctgattccgaaagacatcgggcaactggcaaatttgattgcagtgctcaaagaacccttgcccgagcccgcagagcacggcaaccactggggattgttgtctgagtcagcgacactggacagtgagcaacgcaagaaggtcagcgaaataacacaggcagaaatggcgcggctttcgcccgggaaaggcattttcagcgcattttatgagcagcatggcgcttcgctccagggcaagagcgccgcacaagtcctcgacagcatgatgggaagtacgcagattacgggtttgggccaaacgctgaaaactgcgctaactgtcgacgatgcatcgctttcaactgacccctcgaactgggcgatggcggccatggtactggagctggacccactggccggcaaccagcgtggtgtggtggccggctatgatctttatcaggcagccaacagggatgtacatccttcggtagtggtgtcgcgtctggagcaacacctggtagaacagggcaaagtgcctgccgaaatggctgccgccgccgcccgcctgctactcgcggggtctgagcctgcctttatcgtcaaggggttacccgacaacctgacgctcaagtcgacgacatttgccaggctctcggcagttgtgcaagcccaggagttttgggcgccgggtatagcgacgcataccgatttcaaaacgtttatgcgcttggccgagcatagccctgtcacggacacacaggcggcaatcgaggccaaggcccagacccatgccttgattcaatgggcaattgcccaggacaagatggttcaaaagactgatgacgcgtatacaccggaagatgtggccgcggtatacgaggcttttaatgcgcaactcaatgccttgaaaaaagcccacgaccaactggccgccaccatgccgactcgccgggacatcgccaataaaaatctgacagcggcctatggtgctggatattcattcaatgtgcgcaacataaagatttccaatatcgatgccagcgagagcaaggagcactcgcttgaagagatctacatggccggcaaaatgaaccgtattccccgaggggagcggtacgatttccagctcggcaaccgcttccccagggtcaagccgttgcctgatgtgaatcagcagttcaagagcgaatttgatagttacttcaaaaatatgaaggaagggctgacgacgacagtcaagcatcagttgtcgcagcttcctttggaagatcgccaaaccatcgcgtcgggcaaggtcgagtttttttccttacgtaaatccagcacggccgaagctcagggaacggagtctgcggacgaagcacgagccgccaaagcacgttacgggctgttgatgcgcgtgcaaaccaagattgataagaacggcagcgatcaagaccctaaaaacatccgccatgtttattacgaagtgttccctctgcaaggtgttattcgtcgacgcgaagacctgcccagacatttgcccaaccccccaccgagagtcgcaaatgccgagacctacgaaacgacgcaggccaaggggatcggtatatgggtcgattatgcggcctatgaaaatggcacgcaggcgcgacctgagcagtacagcgacgggttgctgacagctccgatcagcgctccaaacatgcctgaacctcgcgcaggacagcacgccgatgccgtcaccgacctgaaccctcgttttgataggatcgccgaggtggtagccggccatctgctccatgatcgggaggcgatggaggccggggccaagggcgtcaccgaagtggagaaggaggaggctggcatcaaggcgggtcatgattttgtgacgggactgattccctttaaaaatgcgatcgaaaacgcagtcaagggcaatactggcgcggcgattctggactttgcactggatattttcggtttcatcgttccattcgccaaaggggttggtcaggcgggcagggcgctgagcaagttgagcgaaaaactcggaacgcgagcgttcaaagcctccgacagtgtcgtgcggtcattggccggcggcttgaaccctgccgatgggctgggggatctggtcgaggggttggcaaaaggggggaagtcgctgctcaagagtagctatcgcgagctgcaacagatattgcacaagcaatcgtccaaggtgggcaaccctacccaggtgacgaacgcagcatcaaacggagccgggaccggacgtcagttgcccgactacagcgagcacgcactgcctgacggctttcttgaaggtcgtacgataaggggggatggcacgtatcaagtcggcgaagagttctatgtgcgcttcactgatggtacgggaaaggacaggacctttcaggttgaacggcactacaagggcgcgggcaagcctgtgcgtgttatcgaccccaatagccagaagcaggtaatgatgctggttccgaccggcaacggcgaatggcgattggctggcaacgccggcggtggcaaaaaaactgcgaatgcggagagtgtcaggcttgcaccacaacaaaaaccggggcgcaaaggtaatcctccttcgcctgcagtggtaccccctggtcaggtattggccaatcatcacaattggcagtcggtgttggattcgggctttcataacgggcaacctgtttacattcattacaccagcaaggaaggcgcagaagcgatagcccgggcccagggcatcaatgacttaacgcgtaatgaaacgcgcgcgggttcgaagggcggtgtgtacgttaaccctccaggccagcagctcaacagtgaaaacgttgaaacccttttgtttctgggcaacgaacgctatgccggaaggggggagtacaaggtgatattcagcactgaccaagtcccgcgggagttaggccctgtcacggcaggcagctcgattatcgagcttaagatggacaaagaaatcaagctgacgccgtcgaacttcctgtatctggggccgaataagtttccagactattttggttgaaggcgtcttgaacgcgtggtgagcaagtaggaaaaagcccccacccaacccactgcggataggggacgcaatgggctggacgagggcttcttgtacgactgttttactgcgcgatagttttcaccgatacgccacgttcaaccggtgtcgagcgcccgtagatatcttcgaaacgctcgatatcgtcctcgcccaggtagctgcccgattgcacttcgatgatctccagcgggatcttgcccgggttgcgcaggcggtgcaccgaggcaatcgggatgtaggtggactggttttcgcagagcaggaacacgttctcgtcacaggtgacttcggcggtgccgctcaccacgatccagtgttcggcgcggtggtggtgcatctgcagcgacaggcacgcgcccggcttgaccgagatgtgcttgacctggaagcgcccgcccatgtccaccgagtcgtaggagccccacgggcgatagacttcgcagtggttctgggtttcgctgcggccctgttcgttgagggtgttgaccatctgcttgacgccctgaaccttgtccttgtgggcaatcatcatcgcgtccttggtttccaccaccacgatgttgtccaggccgatcaccgacaccagtttgccgttgccatgcaccatgcagttgcggctgtcctgaatcaccacgtcgcctttgctcacgttgccgttggcgtctttatcgttgaccgcccacagcgaggcccagcagcctacgtcgctccaaccagcagccaatggcaccacgcaggcgcgttgggttttttccatcacggcgtagtcgatggagttgtccgggcagcaggcgaaggtggcgtcgtcgaaggtcacggtgtcggcggtctgctcgctgcgttccagggtcagcacgcaggtgtcgtagatgtccggatcatgctttttcagctcttcgaggaagcggctggcgcggaacaggaacatgccgctgttccagaagtagccaccgcttttgacgaactcgaccgcacgtttttcatcgggcttttccacgaactgttgcacgcggctcacgccttcaggcagcagcgaatcgttggtggacttgatgtagccgtagccggtttccgggcgggtggctggcacgccgaacagcaccatctcgccacgctcggcggccacggtggccagggccagtgcgcgttgcagggctttctggtcgtcgatcacgtggtcggcgggcagtaccagcatcaagtcgtcacggccttcgttaaccagcatcatcgcggtcagggccacggccggcgcagtgttgcggccgaacggttccatcaggatgcgctggcagtcgagcttgcgtgcgctcagttgctcgttgacgatgaaacggtggtctttgttgcagaccacgatgggggcgtccatgccttcgaacaccaggcgttccagggtttgctggaacaaggtgtgttcgccggtcagggccaggaattgcttgggaaactgtttacgcgaaagcggccaaagacgtgagccgctaccaccggaaaggattactgggatcatggtgtttctccttgaatcgatatgggtcagagctacgaaggtttgtcgtttcactcttgtttttgtctcggtcctgagctgaaacccgttcagtgtgggagctggcttggctgcgatggcgccttcaagacctgtnnnnnnnnnngcgccttcaagaccgccatcgcaggcaagccagctcccacaagggggcgtgtcaactcagggaaatcgttagcgggtcgacacggggcgtttcacccagactggcgagaggctcgagcccgagccggtgacatacagcaccgctgcctcaccacgctccaacgcaaccggcttcacatcgccgactttcttgtcaccgtcatacaacgccaggctcactttcaccgggttgatctcacgctcgccacggcccttggcagccaccgacttgaccacatcggtcttgccgtcggcggttttcagggtcagggccttgtcgctgaggttctgtacgcgcaccaaggatttttgcttgttcttgaacggtggctcttcgatcaactgcggctggccgctgccgctgttgaccagggtgtagtagtggtcggcagccagcttgaccggcagggtctggctgccgaccttagcgctgtagtcaccgccgggcatgaagctgaagtcgctgctggccagtggcgcaacgtcgctgaggttggtgctgccaacggtggcgctgacttcctggttgctggcgttgtagatgcgcacaaagctggagccttttggcgcagtcgggccgtacagggcggcgtcaccgccagcgaaggccgacagggatacgaagctcaggcccgcagcgattgccagggttttagcgagacgacgaggagtagtagtgaaagtcattgtgagttacctctctttcagttttgcgcccggtcgggcgtctcggattcagatgtgttgattgccatgttctgttggcgcgaaccggcttgtttaagctgcgcaacccaggccgggtcggcatcaccgatttcgttgttaacgggcagataacgttcaggaaactcccagatcagcacctgcggcgggctgttcttgaagtcatcacttttgaggtagctgagcatcggcaggatcgggccgtggccgtcttcggcatagctgaccacgtcgctgtgcaaggcttgcttgagcgcaccgacgaagttccagttggggttggcgctgtagctggtgcccaccagggccaccggggtttcgctgtcgctgaacagcgcgtcgtcacctttttcttcgaccaggtgggtgacgcgtttttccagcggctctttaggcggcatcaggttttcgaacagcgggtccaggggcaggaacaaacgcaagtcgcctttatgtggctcggttttctcagcctcggtgacaaaacgctgcggctcgccgctcagaggggtcttgtcggcaatcgccttggccaattgcttggcggcgacttcggcaccgtccggtgtccagtgagtgtcggtgcgcaggaacacttgcttgccactcagcttggcctgttgcagcgggccaagcaggtccggggccgggatgttgtcggcagccactcgagcgtggaaatcctggtacaggttggcgtgcacgctggccggtttcacttcacccaggtgctccggatacaggcgcaccttggccggcacgatcgccattaccagttggataccctgggccttgagcttctggcgtacgccttcgaccagcgcgtagttgccttgcaggttctggtcttcgttgacggcggggttgaactcctcgtcgctgtacaaccagtgatcacggcccagcaccacgccagggcggccttcattgaacagcttgtagtccagcgccgcccacaggttggtgcccaggcgcttgatcgggaactcgtcgtcgtagtgggtctcgacggctttggtccagcgaccgttgagcacggtggcatcggcgttggtgctgaagccaaagaagctgcgcagcgaccaggcgccgagtgccagcaacagcaccaggaacaggctgatgtagaggacgcgtaatgaacgggtcatggtcggctccctcagaattggaagtaaaggaacggcgagaaactctgcgccgacagtttgagaatcgacgccacgaacagcagcagcaccgcagcgcgcatggcgtagcgtggccagtcagcggtccagtaggccggttgcacggcagcgtcacggcccacgctgaaacccggctcgtggatgctgccagggttgtcgccgggtacggccttgatcaggctcgggtcggctggcttggccttgtcggccgggcggttggtgtagaagtcgcgcaggccgaagaacgccagtgttgcataggccaccaccagggttgccacttgcaggccggtaaggttggcgcggttgagttccgacagcgaccactcgctgaagctgaacatcgcaccgtacatacgcccggcaacgtgcaggttttcggcgcggaagatcacccagcccattaccaccagcaggaaggtgaaggcccagcgcaacacattgaaactgcgcggcgcggtgttcaggccgatggctttttcaatcgccagccacatgccgtgccaggcgccccacacgatgtaggtgatgttggcgccgtgccacaggccaccgagcagcatggtcaggaacagattgcggtaggtggtcagggtgcctttgcggttgccgcccagggtgatgtacaggtagtcacgcagccaggtggacaggctgatgtgccagcgccgccagaactcggtgatcgactggctgatgtagggctgcttgaagttttccatgaagcggaaacccatcatcaaacccaagccaatggccatgtcgctgtagccggagaagtcgaagtacagctgcgcggtgtaggccagtgcgccgagccaggcgtcacccgtggtggggttttgcagggcgaagcaatgatcggccaccaccgcgagggtgtcggcaataaagaccttcttgatgaaaccctgcatgaaccgcgtgcagccctcggaaaatttatccagggtgtgggtgcggttgttgaactggtcggccaggtcgcgaaagcgcagcacgggaccggcgatcaggtgcgggaagatcgccacgaacgctgcgaagtcgatgaggttgcgggtggccggggtgtcaccacggtacacgtcgatgatgtagctgatggactcgaagatgtagaacgagatcccgatcggcaacagcacgtgggtgaggatgaacggctccaggcccgccgacttcatcatcacgttgatgctgtcgacgccgaagttggcgtacttgaagtagccgaggatgcacaggtcgaccgccacgccgagcaatagccagcgctgcgccggcttggtgcgaacgcccgcggcaccgaccttgaggccgatccagtagttccacagcgtgacggccgcgaacagcgccaggaagtccactcgccaccaggcgtagaacacgtagctggcaatcagcagcagcagattgcgatagcgttgcccgctcaaatagtacaagccgaggaagatcggcaagaacagaaacaggaacacattggacgagaaaaccatcccgatctctccatgtttaaccaacagtcaagggccagagcccccccaaaccccccacgatgtcgggggaggttgtgatcgttcccacgctctgcgtgggaatgcctcttgtggcgctctgcgccacgctttgggacgcacagcgtcccgtgctgcattcccacgcagagcgtgggaacgatcagcgactagctgcctttgttgcctttttcatgcgccgggtcgtagaccttggtcaggtcaccgcccaggcggaaggtcttgaacggttgcatgccatgcttgcgttcgatcacatccggcgcgcaggtgtagagggagcagaagggctcaagccaggcaaatttcatgtcttccttgaggtccttcatgtcctgctctttgccgttcttttgctcgaagatgtccgggtctttcaccccggctagcaccttgtcacccaggcgcttgagcgcgctgttgttttcctggcgcaggtccacgccgttgaccagcgcaaaactggcgatcatcgacagcggcggcagcgcgtagttgtggtacgacagggcgcgctgctggcgcttcaattcgttcggcaggaaaccctggtcatcgacctggttcacgccgaccttgtattccttcaccgcccagtcaaacaggtcgcggcggttggtagcgatggacgttgccatcaccgaccaggcggcccagtaggagtggttgttggttttttccaggggcaggttgtcccagtcgctcaccacctggtcggccagcttgttgaaccaggcttcgatttgctgggcttcctgcgggtgcttggccagcggctgcgactcggagaacttcaagcgcacataggccgaggccatgctgcccaatgcccatttgcgcatggacttgccggtgtggttgaagtccttggacatcaacgcatcggccttggcccatgacaccagccagttcagggtgcattcgagctgctgtgggcggccgtcacgcatgaactgcatcacacgtttgctggtgtctttttccagcttggtgatatcggcggtgctgtcgcgaaaggctttttccgactgcacattcagggtcgaacgggccttgtcggagccttcgtatttgctgcgaaactgcaacggcccggtgtagggcgttggcatgctgtcgcaatcattcttgaagtcgccggtcttgaacgcttcgatcggtgcgaagtaaccctggggcggacgcagcggcgcggcggcgttggctgccccggcgaagatcgccaggcccagcaacgatggaatcagtaacttctgcataagtaacctcattgccccgttgacgcggtctgttgaccaccggcggggaatacgttgcgtgtgcaaattttcgcttcaaccttctgcgctgcagcgcccgcttcggggccctgcacttccacggccagcaagttctgcgaggcccagtcttcatcggtgcgcagttcaaaggcgaaacgcccgtctgtatcggatgtttcgggtttctcgatcttgatgtcctcgtggcgcccgttcatgtaccagagggtggcttgcaaggttttcaccgacggatcggcgaagcggatatcgacctgatggttggcgttgcgcaggtctttgttcgcgctgttgaccatcagttcgtttttgcccggtttgagcgtggtactggccgacatctgcgcggtcttgccttcgcaaccgttgtccagcagcgccatcatctggcggtagatggtttcctggtcgaggcggtacagcggcgagaattcccagatcaggatcttcggcgggctcttctgaaattcatcgctgcccaggtactgcagcatcgaaccttccaggccaccgccggggaaggcaacgttgaggatgtcggcgccgatttcttcttccagaaaacctgcgaagttgtagttcttgccactgtggctggtgcccaccagggtgatctgcgggttgcccgaatcgccgaacaggtcgccgtcaccggcttcgcccttgggctcggtggtgaactggtccatgtactggatcgcatagctggtgccacacagttgcccggccatgttgtgcagggtgccggtcttgcccatgcggcccgagcgcttggtctcgaactcacgcttgggaatctcggcatattccggcatctgcttgaccttggccgcgacgattttcgcggtgcgctgggcgccgtaaggggtccagtgctggtcgccacggaagtagaagtcgtgggccggcaattcatccggcagttgttcgttggtcagcggcgacaggtctggcaccacgtaacccatcttggcgaagcggccgagcatggtcttgtagttggtcagggccttgtcgaaatcgtacttggccttttcctcagggttgagcttgttgcggttcaccaggccacgggttggctggtagaccaccaccagttccacgcccttgctcttgaacgcatcgtgcagctgctgcatgcgcttgtagccggccggggtggtgtcgaattcggtgcgcaggtcttcctgggtacggaacagccagtcgccctgggcttgtaccagggtggtgaagttctgctggtagcgcgtggtgtagttcttcgcgtcatgggcggccgggcacaggctgcagcacggctcggcggtgaaggtcggggctttcacttcatcggcgcgtacgccctggctggccgccagcaggccgagggtcagacccgagaggctcagcagtttgatcatgtgtgggtgcataagggtcatcctcagtcctgcaattcggtctggcgttcgacggggtcgatcagcacggctttctgctggcgcaccagcaggtcgagaatttcttcctggcggtcacccaggatgccggagaagctgatgccgctggatttggtcggcgccagcattgacacgcgatacagttcgatactcaacggcgaatcgatggacagcggcccgctgccgttacccgccagttccccgccgaccacgatcagcgacaccttggcgtcgaacgggtcgagggcgatgtcgcggtcggtgtcggtcaagtccttgatgtggccgtacacgccggtcagcccgttggccatcgaggtgttttcgtagagcttgatgttcacgctgttacgcacgcggatcccgtggcgacggttgctgatcaccttgttgccccacagcaggttgtcaccgctctcatagagggtgatgccgtcggtgtggttgcggtagatctcgttgtcggcgatcaggttgttcacgctgttacggtcgatcaccaggcccgagagcttgttgtcatagctgcggttgttgaagatgaagctgtcgttcacctcccgggaaatgatgatgccgtgcttcttcttggtgccgtagacggtgttgtccgcgatgatcaggccgtgggaacggtcatgggggtcaatgccgtagacgatgttgtctttgtaggtattgcccttgatcacaaagcctgtggtctcgtagcagtagaagccgtaccacatgtccgagaactcggaatcgatgatccaaccggtcggctcggggcgcttgagcaccttggccatgttcggcgtgtactgggaaatactcaccccgtacgacttactgttggcgtaaccgaagctggccatcttcgttttggagatataggtctcggtgccgccccaggccagcaggaacgggcggaactccttggccgacttgaacagcgccgggccgttggctttttcatcccagccggtgaccttggtatcgcgcacgaacagctggccgtcgttgatcaaaaacgaaccggcttgctgggacaggcgcagttcctgggtgtttttgtcgatgtcgaggatgcctttacggcccaccacgatcggcaacttggccaggaacactcccggcgaggtttcgctgaagtagtgcttgggcactttgcccagcaggtccttgaggttcatgtagccgtcgtcgacgaagatcgcctggggaatgccatgctggcgcaccacccattcggccatcttgttatcgccgccgataaagtccttgagcgcgtcttcctgcatcatgcggcggatgctgattttgcccgccttggtcttgacgattttcttttccatcgcctgcgcggtgtagcccgacaggtcgggcagcgccggcttggccatttccagcggcgcggtgggcgggctggaaatggtgtaggtcttggcctgttgcagttccttggcgatggtcggcgccttggccgccgtatcggcgaacgctgtggcgctggccatcagcattgccgcgacgagtaggctttgagcattcatggcgcaggctcccatcagaatttccagaccacgtcgacaaacgcgcggtgcatgtaggagtcgacctggctgccataggcatcgccgggcttgaacacgccggcacgcaaacgcaccagcgccgatggctcgtcgatcgactggctcagcgccgcaggtagcaagcctttcttgaagtacttggtgaccaccaggtccatctcttgcccgaggtctttcttgccgtcttcaagaggcagggaggtgctggagaggatcgcgccggtgacgtcatcggtgttgttctgcaccgcgtcgatgccgttgctgcccaccggcttgttgccgtccacgcgccagaacttgtggtacaccaggctggcgtcgtagtcctcgcgcagttgccaggaaccgaacaggctcatggactgcatgttgttcatctcgccgcgaaaggcttcaccgaagcgatgcacgcgagactgggtaccggtccagttcgaacggttgctttgcaggccgttctgttcgtactcggcactggcgcgcgaataggccgcgccgacttgccactgcgggtccaggcgcaggcgcacgccgatgtcggtggcccagccgctcaggtcatcgctgcgcttggcgctggtggggcgtgtgccgtcggcgttcaaggcgttgaccttgtcgcggtcgccgcgcatgccggtgatgctggcccagtagttgacggtgttggtgttgcgccagttgtaggcgtcgctgttggcttcgatgcccagccaggtcaggtcgccgttttcgcgcttgtccagcgggtcgctggcgacacccggttcggcgtagtcgagcttgccgtcgtcgtgggtgtggtggccgcgcacgccgatccactggcccggtgtccactggtaggcggcgtcggcgtagaagtgctggcggtctttgtcgaccggtgacagttccttgaggtcggtgcggtattcgctgaagcgttcggcggcgccgacattggccttgagcaaggtggtgtcgaaggtccagttcagcgcttcgatgttggtgtcgcgccattggccgtcgtcattgcgcaggcgctggcggccgaacttgaggatctcgccggggtagggcgtgaagccgctgtagccgacccagaactcacgcagggccaggtagtttttcttggccttacggtcgtcgttgctcgactgctgctcggtggtgtcatcggccgactgttgcagggtgtcggtctcgatgatgtcgctggacaccacggcctggcccatggcgtaggcgctccacgcgccgctttcgccgtagatccaggggcgcaggtcgaggccgatgccgttgacgtcgccgcctttctgggtgccgaggtcgcggtcatcttcagactgcgcggtggctttgacttccaggccgaagttcttggcttcggtgagcgcggccagggtcgggcacgaccacagcagggcgaaggtcaggccgatgccggccttcacgaatgggttgagcttcatagggattcctcgccgtcttcttcttgcagggcgtgcagttgcagcgtgctttgggccagggtgccgcgggcggccagttcctgttgcaccaggcgttggccttcggcgcgttgcgcaggcgtcagcggcgcttcgagctgggtggccaggtcattggcttctggcgtgtcctgggccttggccaactggctgaagacataggcgttcaatgggtcgggcttggtgcccttgccttgggaaaacagttgggcaatggcgaagtcggcgctgttctggccgttgcgcgctgcggtcagcaggtggtccagggctttttgcgggtaaaccttgcccaggtagccacggcggtagatctggccgaggtagtaatcggcggccacttcacggcccacggctttctcgaaatgcgcctcggcggccttggcatcggcgggcacccacttgccttcgtagtagagcttgcccagcaacaattcggcgcgtggctggtcggcggcgcggccgttgtcgaggtacttcatcatctggtcgacatcgcccagttcagggaagtcgtagagcagttgcgccaggctgacccaggacgccgggtagccgggagcgattttttccagcaaagcctgggcggttttttcgtccggggtgccgagggtggcatcgccgagtacgcgggcgacgctgtcgacgcgctgggcggtgacggtgccacggctcacgcctgcttccatttgcttgagcagttcggcctgttgttccggctgctgttttttctgatagaccgtggccagctcgacgtagcagatatcggtggtgttcagcgcggctttgcagatgcgctccacatcatccagatgctggtcgtaggtaccttgggtgcgatacagcagcacctgggccaggccggcctccgggtaacccgccgcctgccattggctgatctgctgttgggcattcacattggggaagctgtgcgggtattgcagatacagcatcgcgagcgggatcaaggtattgccttcgccattggcaaaggcctttttcagcaggctttcggcttcatggtgctcggcctcagtggcgcccggcttggccgccaacaggcgacccaggcgtgcctgggcgcggggcgaggtgtctgccgccgcacggtaggtggcttcggcctgcttgatttgcgccgggtcgcgtgtgccgacctggatatcggccaggcccacctgggcctcgctgtagcccagttccgccagttgctggtaattctgctgtgcggtgacggtgtcgccgcgcttgagggcttcgttggccaggcgctggtcgggcaggccggcgcaaccggctaggctcacggccagtgccagcgcgcagtacgcagaggccaagtgaaatctgctctgtgtgggagctggcttgcctgcgatggcatcgctgcggtgcaactgatgcaccgagtcgcctgcatcgcgggcaagcccggctcccacatgggtcaacggtgtatttggaagagtcacaggcatgtcctcgcttacagaccgtgggccatggctttgtcgatcagccagttcagcgatgggccacggtcgctggtgacttccaccgggcgaccggcgtaggtgctgtccagcggtgcgtcaggcttgatctgcacgcggatgtcagaagacaggtcggcgctgttcaggctggtgctgctgacgatggtgccggtgcgcacttgttcttcgtcggcgacctggaagttcacctgcgtacctgggcgcacgtcaccgaactggcgatagctgaagcgcgcttctacattggcttcgctgccgcggggtaccagttggaagatcacatcgcctttgctggcgtactggccgtcggcaaccaattgctgggccaccacgcaatcgcagggcgaggtcagggtgccggtcatttgcttgccgaacagctcttcaaccttggccggttgcaactggtcttcgtccaagtggcccttgagcacatcgagcatgctggtgctgaaggttgccagtggcgcgcctttggccgctaccgaatcacccttgagcaggctttgcacggtgccgtcacggggcatggtcacgttcatgcccggtacgctgacgaggccggcctgggcgtggctgacgaagtacatgccgtagagcgacttgaccacaaagccgaaggccgccaggccgaccaaaaagatcgccaggctgaaggtcacggcgcgcaggcgaccgaacgcggtcatgccgctgccgccgtccttgaccttgcgtgccttggtgaagttgtcgcgttgcagggtcgcgagcacgtcgcccatggtcacgatgtcgccggacaggtgcgacgtgatcaggtggcgcagggtggaaatatcctgggcatcgaggttctggaactggcaaccggtgcggccggtctggcggtcgtaggagcgaatctgcagctccacgtccatggccaggccgaggttatcgatcacgaactgcaggcggcctttgtgcacttggccgatggtgagcggctgggtggcggtgaaggccaggccgccggcggacaggtcgataaccttcgcctcagtcggcgtgcggtcgctgttgaagaagcgcagcttggccgggatttttacccgggcgtgttggcgctgggcttcggattcgtggacaacgttggcgtttacttggctattcatcgggtgtaattcctaggttaattcaggcttggcagggtcagaccatcatcagcaacacggcaacgaagatgctgccggcggagaaggtcatggtccgagacgaccaggtgttgaaccaacgttgaaagctggccaaatcgcgggtcagtttggtgtcctggcgggtccaggactgttgatcaaggcggaagaacacgtagatcttcaccaacgcgcccatgatctggttgtaatagagaatcagcgggtaggccgggccaatcttgtggccggagcacgacagcagcagggtgaggatcaggcgggtaatgccgatccatagcaggtaggcgaggatgaacgcgccgccgtacttgaacgtggcgatcatcgcgacggtcaggccgagcagagaggtccacatcgacacgcgctggtcgaacagcaccacgctggtgaacaagccgaggcgacgcacgcccaggcccagggcacgggagttctggcgcaggttgttgccgtaccagcggaacattagcttgcggctggctttgataaagctcttttccggcgggtgttccacggtgttgatcgccgcatccggcacgtagaaggtgtcgtagcccaggcgcatcaggctgaaccagctggacttgtcatcaccagtgaggaacttgaagcggcccaggcgccagtgttgcagcgagtcgctttccacgtcggcgataaagcccgggtcagtcactacgctggcacggaacaccgacatgcgcccggtcatggtcaatacgcgcttggacagggccatggagcacatgttgatgtggcgttgggcgaagcgcagtttgtgccattcgctcatgatgtagccgccgcgcacttcgcagaattcgttggtggtcaggccaccgacattgccgaacagctggaaccacggcacggtcttgcgcaccacgccttcggccagcacggtgtcgccatcgatcacggccaccacggcgcggtcgtccggcaggtggcgcgagatggcgcgaaaaccgaaggccaggccgtcgcgcttgccggtaccggcgatgcgcacgaagtcgagcttgacgtgagccggcgggttgagcttttcccagaggctcttgaccagcagctcatcggacatttccaccagcgagcacaccacggtggtggggaagccgcagtcgatggcttcgcgaatcaccgagctgtagacctgggcggtggtcagcgcgtcgatacgaaaactggtgaccatcaagaacacatgggacgggtcggcggccttgcccagcttgcgcactttgcggcgcaggtgcgggtacaccacgtacaggaacagcatgccgcgaaagaaatgcgtcgcgcccatcgagtagcgccagatacccacggcaccaatcaggaaaataaaattcttcgattgcgaatcgaaggtgctcgccggcaacagcagggcgagacccatcagcaggctgagaaagaacagccagccggccgattgcagaaatacatgttttaacttggacataagcgtcatccgcaaggtgaggaggcttcaggctgcaagcgctggggataaagccacttgcagcctgaaacttgccgttgctgttaccagcaaataccttcggtacggccgctcacgctggtggccttggacatgaagcccaccaggtcgaccacttgtttgccttccggagcgttatgcgccagggcacggaacttctcgtcacggttaccgaggatgatcacgtcggagttgttgatcacatcatcgaaatccgagttgagcagggacgacacgtgggggatcttgccttcgatgtagtccttgttcgcgccgtgtacacgggcgtattcgacgttgctgtcgtagatgctcaggtcgtagcccttgccgatcagcatttctgccagctctaccagggggctttcgcgcaggtcgtcggtgccggccttgaagctcaggcccagtagcgcaactttgcgtttttcgtggctggagacgatgtcgaaggcgttctgtacctgggactcgttgctgcgcatcagcgagttgagcagcggcgcttccacgtccagggagccggcgcggtaggtgagggcgcgcacgtcttttggcaggcacgagccaccgaaggcgaagcctgggcgcatgtagtactgggacaggttgagggtcttgtcctggcagaccacttccatcacttcgcgaccgtcgacgccgacagccttggcaatgttgccgatctcgttggcgaaggtgactttggtggcgtgccacacgttgcaggtgtacttgatcatttcggcgacggcgatgtccttgcggatgatcggcgcatcgagttcttcgtacagcgactgcaggacatcgccggaggcggtgtcgaactcaccgatgacggtcatcggcggcaggtcgtagtcggcgatggcggtggattcacgcaggaactccgggttgaccgcgacgccgaaatcaacgccggctttcttgccggagcagtcttcgaggatcgggatcaccacgttggccacggtgcctggcagtacggtgctgcgcaccacgatggtgtggcgggtggtcttgtcacgcagtacaaaaccgatctcgcggcataccgattcgatgtagttgagctccaggtcgccgtttttcttgctcggcgtaccgacgcagatcatcgacaggtcggtgtcgcggatggcttcggcgaagttggtggtaccgcgcagtcgaccggttgcgatgccttggctcaacagttcgcccagacctggttcaacgatgggggatttacccgcattgatcaggtcgatcttttccttggagatgtctacgccgaccacttcatggccacgggcagacaggcaaccggcacacacggcgccaacgtaacccaaaccaaatatgctgatgcgcatcgcaattacctctatgtttaaatcatgccattagatggccggagttcatgtttgcaagcgtcactgatgccgcgaaagttaggcgaatagacgccgacttaccgcgtgcaggcatgttaaatagcgagtgactaactattgcactcaagttgtgcgcaacgtggccttgttattggggcttgccctgaaatgcagccggttttccgtggcggaagggtccggcgccagtgccgctgggctttgatacaggcaagaagccttttgatatcaatgccttgggtgttaacactggctcatttaggtcagcgctgccttggcctttagggggttggcaatgagtccttatcgccgccctcaactcaatcagttgatgatatgaccctcgagccaaagtgctttatgacaacttggctacttccattggtcggtatgtaagtcatctcttacgtaaacagagaatttcgttaccggtggtatgagcggtgcttcaggacgaagttccgggccgctcatcccctttccggaaattttttgaaatattagaaaagatggcactagtactatattgatagcacttgctatttaggccagtagttatggggagttggtgcgagaggatagttttgtgccactaccgttaaaaaaaagtggtgccactacgaaaaaaaccgacgagtgtcgagtgaagaaaatgttagggatgtgtcaggatattttttgacgccaaataaatgacggttccgaggctgaaatgcagacaaaaatgtgggagctggcttgcctgcgatagcgctctagcagaaacacatgagtcggctgacctaccgctatcgcaggcaagccagctcccacagttgatgttgttggctggacaggccttattccggtgcgtgatcgcgcaaaaacaccaggttgtccggcttggactgctccgcattgaagcggtaaccctgcacatcgaactgcttgagctgtgctgggtcgttgatgcgttcttcaatcacaaaccggctcatcatgcctcgggcctttttggcgtagaagctgatgatcttgtactgaccgttcttcaggtccttgaactcggtattgatgatccgcgccttcaacgccgtgcgcttgaccgccgaaaaatactcattggacgccaggttgagcagcacatcgtcgccttgctcggccagtgcttcattcaaccactcgctgatgcgcgtaccccaaaaagcatagaggtccttgccacgggcattggccagcttggtgcccatctccaggcggtacggcatcatcaaatccaacgggcgcagcaagccgtagagccccgagagcatgcgcaggtggtcctgggcgtagctgaaatcggcatcgctgaacgtctcagcattcaggccggtatacacatcgcccttgaacgccagcagtgcctgcttggcgttgtccggagtgaaggccggcgtccagctgccgaagcgcgcggcgttgaggccaccgatcttgtcggagacgtgcatcagctcactgatttgcgccgggctcagttcgcgcagttgctcgatcagttcctgagagtggtccaggtactgcggctgggtgaagcgcgcagtgaccggcttggactcgaagtcgagggttttggcgggggaaatcaccatcagcatgaagttggctcctggaatcgtggcgtgtagcgtgggcgcgattctagggggttgggcgttttgactccacctatgatggtgataggcacattatagcggccgaggtagccgtagcgttcgtcgtccttgtgctggtttttcgggtcttgttcgccggtagcggtgtgctgctggttgtagcgcgggtgttcgaaggtgtagagcagactttcctcgccggcctagatttcgcagcggatgtcggatgctaagccagcatgctggtgatgatgtcgggcacggtctggttctggaaagttcgccagttggagcgcaggttgaaacgcgccagagtcggttcgaccacggaggtgtagcgggtacggctaaagctgttgtcacccggctgccaggtcgagcatgcggtagacgtggtgatctgatactcgacttcctgtgcaaggattttcgtcctcgatgctttcagttatcgagaggaaactcttttttgaatttatcaataacattattaaagtgttcattatttggttcgatgagagtagcagggagctgagctagtgggtgttgcattagtgggtgatcaaagcttgatggatttttaaggttagcccactcccggattctgagaaatgcaagaatttcgtatgggaagagcatgcgttcttcataatcaaattcaagcacgttattctgttgtggtgttcttgcatttgaaaggtgaaagtccgccattgaagaaattaatacttgtaagagtgcctggtctgcagtgtcccagttaatgagggcttgctggtatggggagagttctggcgggtatgagtatggtgatgtgtctatgtctttgttagtgctttttgcgtagagctctatcagaaaccagaagtggcgaaatagcgtacctacttgatgtttctcattgttctggaagttcagtagtggcgtatctagaccccttattattatgttgaatagtagggcgcattgattcttccagcccgaaattgctgccagggaaagtgaaagcactgacactgccgggagaattgatccgccttttccgctattggccagtgtttctttcagctcaaccatttggccataatagaacgatgcatttgccagttctttaaagtcgtggttgttgttaagtgcagtgctttcatagtgaattagatgccaggttgctagattttcggcttgatctcctaaggtgtgcgcaatatcttgtccattcaggtagtcggtaaatgcccttgccggctcatctagaaatagttcttttggtgtgggggtgctgatccagttatttatccattttctgacttttttatcaagcttaattgtatttgtaattgaattcatttgttatgtccttgttgctaggttgtaagttttgccgatcgattgtgaagcttgctgcatcctttcttaagattatctacaaatacatcatacttttcgtgtgccggaggaagtttgttttttttgcatcttgtaaccagccttgttgtttcgaacattgtgcatcgtagtcggaactttgctgtagttaccgctccactgatggttacgctgcggttgccaccgatgctggtggtttcgttctggccgacgtcctccgcgcggtggttgccgattgagatggttgcgttgtgctcgacccgctccttgcggtccttgccgacgaagatgccgttgttgtttttgatagggacgttgttattttttggcatggataagcacctcttggtgccccagctcatcctcaaagcgcagctcattgaagccatcgcttttatgggttcggctcttgatggtgatccgcgtcttgtgtttgggcagctcatacggcggcaaattggtcacgcggtagttgcggcccgtggtgatgggctggtcggggtcgccatccaaaaagctgatgatcagttcctgatccacacgcggcagggccatggcgccccaggtcgcaccggtccaaccctgagccacacgcatccagcacctactctggtcgttgtttttgtccgagcggtcccacgtgaactgcacttttacccgccccccttcatcgcaacattcttcggcggcgaggcgggcgatgaaatcgaggtcggtttcaccggcctgaacgcagtattcgcgaggttggtgttcgaagcagatttcgctgcggatgtcggtcagtttctgctcggccagcatgtttgtgatgatgtcgggcacggtctggctttgaaaaattcgccagttggaacgcaggttgaaacgcgccagattcggttcgactacggcggtgtagcgggtgcggcgaaagccggtgtcgccttgttggaacaggctaaccaggccgtggacgtagcgcaccagggggggcaaccgccggttgccaaatatgtgtggctttcatgaagagtgcgcaatcaatattaataccaatcgatttgtggtgtttcacctagattgtgttttatccatgtttcacgcctttcggaacttaagccgaaatcggaaatgtcttcgtaccctaaatcaagactcattttaaggtctttggaaaggtgaaaggtggcggtggtccatggtgagttagtatcctttttgtatataagtcgaagtgtttggaagtgttcttccagttcttctatattttcgtttatgtagccgtaactgccttgaggctttttgtagaagatacttatgctccaaacgtcttcaatcatctcggttcttatccatgcttctatgaagtcatcaggcacggtgtcaattaaaaattgaccgattagagtatagacttgctcttgtggtggtaggttctcttgcatgaattactcctggctatccgccatgcttatttgcataggttattgggtcttgtggtatgccatctatccattgcttaattgttactttgtcgggtctgagtgagtctccattgtatcttgggtttatttcgatgcgtacatctttgttgtcttttaatgctttttcccaagaattttctagctttttgtaggcgctgttattgaaattgccattttgtgcaaaatggttcatctcgtcagtcgggccgtcaaaccgacgtcctacgaaatgcccgccttggtcatcaggtagtcgatcttttcctcctgcagttttttgggcatttgggtttctcgtctgagacttgtttagcgttaaagtgccttcaacttttgtcactcgtccatgactgtcaagctgatatgtgtatccgttttttgtatgcgtagtcggcctttgtggttgtatctttgcgccgttgtctgcttttggggctaaaggctgctccgacgcatgtcgttctgctgcattttttgaaagtcgttccgatgcctcttttattgctctctgcgttgcctgttgcgcggcctctgatccgagacggttcgcgcccttgccaaccagcacacctccctttattgcatctcccacaaatggtatcgccgcgactgcgcagaggccagcattgactgcatcgccctctgccgcatagatccctgcgttgatcaggtccgggatagcccccagtccaggcacgaagcccaacgcgtccaagccgccgtgaacccatgggctcgcgctgccccaccagcctttttccgaatctgtttcggccttgatcggcggattggcctgcgcggcggggaccgcagcgggtgcggtttctcccactacgcggccaatggtattgccattggcgttcgtcccaccgggagttcgattcaggcgtggatgagggtagtcgggcaggggaacaggtagtgcttctttttgtagcgccacatactcggcataggtcatttcctgttgggtcaggagcgtcgctccttcatagacctgaacagtcacgccccagccgttctcaaaactagcgaagaccttgccgccataaggtacgaaggacttgttgacgttgatctctaatggctccgccatgctctagaccccattcatccaaaacatgtcgtcatggcgcaccaccaacttgccttcggcgcgtacgctgctgctcttctccaacgggtagcatttgccgccgactgtgttgctcttgatacctttggcggcgccagctccatcccccttggtggtcggcaccaggctcttgtcgaacaccaccactggcctgccgttggcacgtactgatttggccacgccggtagcggttttcagctcggcagtgaccgggtagggcaccggtggtatggcgctgcccatcggggtcttgcacacgtcggggacgatactgacgaccttccatttgccttgtttgcgagcgatgacgttatcggccatgtcagagcgcctccttcgctgcgcgtttgatcagcggtgcattcggatcagtctcgaagcgcgcttccaatacgcggatgcccaggtgattgggcaagctgatgcggtgggtgagcgccaaggtcatggcttcggtgtcgatgcgcagcgtatcggtgagcatgggcaatggcagcatggcgcctttgtgcaggcgcattaggacaaacgggcgatggccgggcagttcgacgcacaatgtgccgtcgggcgtgaggccaggggcggtcaggttgaacagttcaagacgaaacgcgggcggcggaaattcgatctgttgatcaaccggcgcaccgttccagtaggcaaagtcgaaatcccgtggcaagcccggccagcgttcccgctgccagtcctcgtcatagctcccggccaagggcaggcgaggcgcccaggcacgccccaccacgccgaatccaaccgggtggtttttgtagttggccgcgagctgcgccatgccacgggcgtccggttcatcctcggggtgtttgacccgatccagacgccacaccggtttatcgatgggctcgatctgtggcgcgggaagttcgcgcagcggcttgtccagttgatagccaaggtcttcttgacgcttgtcgatccagccgcagcccagtgggttgctgtagcaaacttcgttgagcagatagggcggggtgttttcatcaatcgcgtgttcgggattaggcactacgctgctgccaccgaaggcatattcccagcgcagcggaacacatgttgcggtctgaggttcggacaattgccagccgccgaacaagctgtgatggaattggcgagggccggtgaatttgagttgcttgtccagcaagtaatggcgcctcggcgcctcggcccgacgcttaaaagcttcttgccgggcggcttgccattccattagctggtactcggtcaggcgttcgccgggactcagcggcgtcggcaggggcacctcgatgttgggcggtggcgccagcggcgcactgatgcgcagcccggcggtccactgcgttgctggttggccttgtggcgcatgagcatggcccgcaacgatcacatcacagcgtggtttgaatggcgccaggtcgctttcctcgcagacgctgcttgccccttcctcgccgtagtagcgatcagcggtgcatagggccaacggatcctcatccagtacctcggcccgaaactgccccggctgctcgtcaatgggtatcaaccgatagcccaccttcaaaaccagcaccgggtactcttggtcgtccatgcccagggcgctgaaacacagcgcatcaaaaggcgtcagattgcgaaattccatgacgccccctagttgatatccacgtctttgccgttgatctgcaccgcgccgctggcgctgaaatcgaaggtgcggccattgatcagtacggtgccgtcggacttcatcaccaaggtggatttgcccaccgtgaccttgaattcatccccggcgtcgatggtgaatttcttgcccaccgccaccgatttatggatgccgacctgctcgctttggctcaggcccacggtggtgttcatggccgcgccaacgctggtctggtaggccgcgccaatcgttaatgccttggctaaaccgatggtttcagctttggccagcttgatggtctctgccttgttgccaccgatggtcacgctgcggttggcaccgatgctgatggtttcgttctggccgacgtcctcggtgcggtggtcgccgatggagatggtttcgttgtgctcgactcgctccttgcggtcgttgccaacgaagatgccgctgttgtttttgatgtggacgttcttgtccttttcggcatggataaacacttcctgatgcccgagttcatcctcaaaacgcagctcattgaagccttcgcctttatgagttcggcttttgatggtcatccgtgtcttgtgcttgggcagctcatacggtggcaggttggtttgccggtatgcccgaccgatagcgataggctgatcggcatcgccatcaaggtagccgatgatcagttcctgacccacacgtgggatggccatggcgccccaaagctctcccgcccagccttgagccacacgaatccagcatgagctgtgatcgttgtttttgtcagcgcgatcccacggaaactgcactttcacccggccccattcatcgcagtaaatctcttcccctggcggcccgaccaccgtggcgatctgcgggccgtcgatgcagggtttggcacgcagcggcgccttccaatctgaggtccagcggatggcgctggcggtcatttcataagacgtgccgcggtcgctgccgaacgcctcttcctgcaagctggtgtgctgtttgccttcgtgggtgatggcgatggtgcgccaacggtcgttgaagtcttcgcggggatgctcgttgaggtcgaaggcgagccccggttgcaggcgtgcgtcgtcaccggccaggtgcgccagtttggcgtcattgcgcagggcggtcagccgggnnnnnnnnnnnnnnnnnnnnnnnnnnnnnnnnnnnnnnnncgcggtgttcgaaggtgtagagcaggccttcctcggcggcgaggcgggcgatgaaatcgaggtcggtttcgccggcctgtacgcagtattcgcggcgttggtggtcgaagcagatttcgcggcggatgtcggtcagtcggtgctcggcgagcacactggtgatgatgtcgggcactgtctggccctgaaagatgcgccagttggagcgcaggttgaaacgcgccagggtcggttcgatgacggcggtgtagcgggtgcgatggaagccggtgtcgccctgggtgaagaggctgaccaggccgtgtacgtagcgcaccggcatttcgccgcgccagatcgtgaacagccctgccaggtcgagcacgttattgaagtcgatggcggcgttgtggctggccagttccaaatgcagtttgaacggctgggacaggccttcttcaagcgtgaaggacaccacatcgaaggcatcgcctttcaagggctcgaacgtgaatcgcaggtcgctttggcggggcatggagcttccttttttcctgttgccccgccaattgcaattgccgtcagccgggacacgatggggaacatgcagctcgcagaaccgcaggttggggccgatcttaggaagccgtaagcgaacccttcaatagggtggagggaatcaagaggtctcttacttattggaggggcaatagctgtaggacttatccatcatggccagccagaggcccgtcgaacctggccaatgccatccgggcggacgtgatcagctatagtggccgacgactctgcagaggaagaccccgtgtgcgattagcgcttttattgtccgcttgcctgctgtgcctgaatgcccaggccgcgccggtggatgtcgccagcctggaccgtggtacctggccggaaaaactcgtcagcccggcgctgttcgatgtggcttcgcgtgcggagatcctgatgtttgcccacggcctgctcgccagcgaagccttggacgacgccgcgctcaagcaacgcctggggctgaagatcatcaacctggctgccatcgacgacctgcgtcgccagctctggcaacggctgttggagaactacatgttcgcccagcagagctgcgaagaagacgcctcgttctgctacctggtggagaacatggacgacctgcgtgagcaggccggcaagttcgaggtcagtgacaactcgttctatataggctgggccgcccccagccggcactttcacgcacgctatctggacgagttgttgcgcaaggctgcactgtttccgcagatcagcagtgaagtggcgcgctttggcgatcatgagcgcaacggtgatgaactcaatgaccggatgtttttactgaccttcgacggtggccctgcagctgtcagcggcaataccgactggctcaccgattacctgcgcaagcaaaagatgaacgcgacgttctttgtccttggcagcagcttgcaaacccgcgtggagcgcagttccgccgccgatgtgcaggcgctgtaccaagggcagtgcgtgggtgtgcagggctggcagtaccgctcccatagccattgggtcgactggcaaagctccatcacccgcagtgccgggctggtacagaacctgatgccggaaaactatgtgcccttgttccgcccaccgtatgggcagcgccgtgcggacagccagggcttcttccagcaacagggcctgcaagtggcgttatgggacatcgattcccaggacgagccgggcaagctcaaggccgatgagtcggcgcaacgggtgctgacgttgatgctgctgtggcgcaaaggcgtgatcgtgtttcacgacactcaggacaaggcgcgggtggcattaccaatggtattgcaggcgacggcgcagagtggcttgggttggcaggagtgtcgcgaggcatttcgatgaagtgcccgactttgctggggatggggtgttttcggggcgatttgctgcgacatttcgatgcaggcggacttccgactttaacggggtacatggcactcggctagtgctattcgtcatcctgaaaaataaacttcaaaaaagcgtcaaagtgctttttcctgtcatgggttttgcggtattacgaagtcagatcgccgaaacctgcagcacaggtggcgtcttccaagactcctcctgtgggcactgcacttgaccttgttcaaggtgcaatcggtggtcgaatcgaggcgcagcaccgcccaggtattgcgtcgaatggctcccacaaaggtgaccgagtatggatgatcatggacgtaacccttcttccgaccagccaatcctttatgtgcttgataccaacgtattgatccacgatccaaacgcactgctgaacttcgaagaacaccacgtcgccatcccgatgatcgtgcttgaggagctcgacaaactcaaaagcggccaccacagcgttgccgccgaatgccgccaggccatccgcctgatcgacaagaccctgggtgaagcctcgcccgaggacgttgaagtcggcgtaccgatccagcgtggcaagggcgggcccaagggcttgctgtcgatcctgatgagcaagcgcagcgagcccaacagcctgctgccggaaaacctgaacgacaacaaaatcatcaaccaattgatcgacctgcatgcgcgcgacaaggacctgcgcgtggtgctggtgaccaaagacatcaatatgcgcctcaaggctcgagcgtgtgggatcgctgccgaggactacagcaccgaccaactggtcgacgacgtgtcgatgctgtcccgtggttatcacatgatgaccggctcgttctgggaccgtgtgagcaaggtcgaaacccgtcaggaccacggccgcacctggcaccaggtacaactgatcgacaacctgccggccgtgcatatcaatgagttcatcgtcgatgaacagggcttcgtgggctggatcaaagagatccaggtcgacaagctgctgattctcgacctgcatcaggaacccctgttgcaccaggaagcctggggcctgaaaccgcgtgatatctaccagagcctggcgctctacgcgctgctcgacccggacatccacctggtcaacctgaccggcgccgcaggctcgggcaaaaccatcctggccctggccgccgccatcgaacagaccatggtcaccaaacgctatcgccgtatcatcgccacccgcagcgtgcagggcctggaccaggaaatcggctttctgcccggtactgaggcggaaaaaatggagccgtggctgggggcgattaccgacaacctcgaagccttgcacatggatgacgaaaacacccatggcagcgtcgactacatcctcagcaaagtgccgttgcagttcaaatccctcaactacatccgaggtcgcagcttccagcaaagcctgattctgatcgatgaatgccagaaccttacgccgcaccagatgaaaaccatcatcacccgtgcgggcgccggttccaaagtggtgtgcctgggcaacctggcgcagatcgacaccccttacctgtccgcgaccagctccgggctgacttacctgacggaacgcttcaaagacttcccgaacggcgtgcacattgcgctgcaaggggtaccccgttcgattctggctgaatacgccgagtcccatctgtaactacagcgaacctgcgacgaaaagccccggatttttcacgaagtccggggtttttgttttgtgcgacatttgcctgcgttaacgcgtcccgggtgcttgtggtctctgtaattattttgttacattttttcttgcggtaaaaactataagaacactgcaagaccccgtcggaacaccacctccttgattcgacgaacgtttagaaaacctgtccagggttttcaccgtgaccctgcctattacaaaagcccgaaacaccgctcattgatgacgcacatatccaaagggaaaggaaaatggacgtagcaggtaatggcttcactgtgtcgcaacgcaatcgcaccccccgtttcaagaccacacccctcacacccatagcactcggcctggccttatggctgggccacggttccgtggccagggcagacgacaacccttacaccccgcaggtactggaatcggcgttcaggacagccgtcgcctcattcggccctgagactgccgtgtacaaaaacctcaggtttgcctacgccgatatcgtcgatcttgcggccaaggacttcgcggcccagtccggcaagttcgattcggccctcaagcaaaactatgagctgcaacccgagaacctgaccatcggcgccatgctcggcgacacccgtcggccactggactacgcctcgcgcctggattactaccgcagccggctgttcagcaacagcggccgctacaccaccaatatcctggacttttccaaggccattatcgccaacttgccggccgccaagccttacacctacgtcgagccaggcgttagcagcaacctcaatgggcagttgaacgccggccagtcctgggctggcgcaacccgtgactggagcgccaacgcgcaaacctggaagaccccggaagctcaggtcaactttggcctggaccgcaccaacgcgtactacgcctatgccttgggcatcaccggtaagggggtgaatgtcggcgtgctggactcgggcatcttcaccgaacactccgagttccagggcaagaatgcccagggccaggaccgggtgcaggcggtgacctccacgggcgagtactacgccacccatccgcgctaccgccttgaagtgcccagtggtgagttcaagcagggtgagcatttcagtatcccaggggaatacgacccggcgttcaacgacgggcatggcacggagatgtccggggtgctggccgccaaccgcaacggcacgggtatgcacggcattgccttcgacgccaacctgtttgtcgccaacactggcggcagcgacaacgaccgctaccaaggctccaacgacctcgactacaacgcattcatggccagctacaacgccctggcggcgaagaacgtggcgatcgtcaaccagagttgggggcagagttcgcgcgatgacgtggagaaccacttcggcaacgtcggcgacagcgccgcgcaaaacctgcgcgacatgaccgtcgcctatcgcccgttctgggacaaggcccatgccgggcacaaaacctggatggacgccatggccgatgcggcccggcaaaacacgttcatccagatcatctctgcgggcaacgacagccacggtgccaacccggacaccaacgcgaacctgccgttcttcaaaccggatatcgaagctaagttcctctccatcactggctacgacgaaactagcgcccaggtctacaaccgctgcggtacgtccaagtggtggtgcgtgatgggcgtatcgggcattccatctgccggccccgagggcgaaatcatcccgaatgccaacggcacctcggccgccgcgccgagcgtttccggggccttggcgctagtgatgcaacgcttcccctacatgaccgccagccaggcgcgggacgtgttgctgaccaccgccagcctgcaagcgccggatggtccggacacgccggttggcgagctgaccggaggccgcacctacgacaacctgcaaccggtgcatgatgccgcgccgggtgtgccgcaagtgccgggtgtggtcagtggctggggcttgcccaacctgcaaaaagccatgcaagggccggggcagttcctcggtgcggtggcagtggcgttgcccagtggtacccgcgatatctgggccaacccgatttccgatgaagccattcgcgcccgccgcgtagaagacgctgccgaacaggctacctgggccgccaccaagcagcaaaaaggctggctcagtggcctgcccgccaatgcctcggccgacgatcagtttgaatacgacatcggtcatgcccgggagcaggcaacactcacccgcggccaggacgtgctcaccggcagcacctacgtcggtagcctggtcaagtccggggatggcgagttggtgctggaaggccagaacacctattcgggcagtacttgggtacgcggaggcaaattgtcggtggacggcgcattgacctctgccgtgacggtagatagcagcgccgtgggcacgcgcaatgccgataacggcgtgatgaccacactgggcggcaccctggccggcaacggcacggtgggcgccttgaccgtcaacaacggtgggcgagtggcccctgggcattcgataggcacactgcgcaccggcgatgtcacgttcaacccgggttcggtgtatgccgtcgaagtcggggccgatggccgcagcgaccagttgcagagcagcggggtggcgaccctcaatggcggtgtggtgagcgtgtccctggagaacagccccaacctgttgaccgccaccgaggcgcgcagcttgctgggccagcagttcaatatcctcagcgccagccaaggtatccaggggcagtttgcagcgttcgcccccaactacctgttcattggcactgcgctgaactatcaaccgaaccagttgaccctggcgatagcccgcaaccagaccaccttcgccagcgtcgcgcaaacccgcaatgagcggtcggtggcgacggtagccgagacattgggcgctggcagcccggtctacgaaagcctgctggcgtcggattccgccgctcaggcgcgggaagggttcaggcaactgtcggggcaactgcactcggatgtggcggcggcgcaaatggccgacagtcgctacctgcgtgaagcggtcaacgctcgcctgcaacaggcgcaggcactggactccagcgcgcagatcgacagccgtgacaacggcggctgggtacagctgcttggtggacgcaacaacgtcagtggtgacaacaacgccagcggctactcctcgtccaccagcggcgtactgctgggcctggacaccgaggtgaacgacggctggcgcgtgggcgcggcgaccggttatacccaaagccacctcaacggccagtcggcgtcggcggacagcgacaactatcacctgtcggtctatggcggcaaacgcttcgaggcgattgccctgcgcctgggcggtgccagcacctggcaccgtctggacacttcgcgacgggtggcctatgccaatcagtcggaccatgccaaggccgactacaacgcgcgtaccgaccaagtgtttgccgagatcggttacacccagtggaccgtgtttgaacccttcgccaacctcacgtacctgaactatcaaagcgactcgttcaaggaaaaaggcggtgccgcagccttgcatgccagccagcaaagccaggacgcgacactctccaccctgggcgtgcgtggccatacccagctgccgctcacgtccacctcggcggtgaccctgcgcggtgagctgggttgggagcaccagtttggtgataccgatcgtgaagcttctctgaagttttccggcagtgacacggccttcgccgtcaacagcgtgcctgtggccagggatggcgcggtgatcaaggccagtgcacaaatggcgctgaccaaggacaccctggtgtcgttgaactacagtggcttgctgtccaaccgcggtaacaacaacgggatcaatgccgggtttaccttcctgttctaaccttgaatgtaggagcgagcttgctcgcgaaaaacgtcaacgataacgcgtgcaccctgggtaaacgcggcgcctgtgagtttttcgcgagcaagctcgctcctacagggtgggataaacagccctgcgcaaattttgacccacaggtttacaatccctgctcctgatcaggagtatccctgtgctgactcatctcgattcccaaggtcgcgcccatatggtcgacgtcaccgacaaagccgtgacgttccgtgaagcggtggcgcaagcgcgggtgcgcatgctgcccgacaccctgcaaatgattgtcgacggcgcccaccccaagggcgacgtgtttgccgtggcccgcattgccgggatccaggcagcaaaaaaaaccagtgacttgatccccctgtgccacccgttgatgctcaccggcgtcaaggtcgagttgagtgccgacggtgcagacgcggttcttatcgtggcgcgctgcaaactctccggccagaccggcgtggagatggaggccctcaccgccgccagcgtcgccgcgctgacgatctacgacatgtgcaaggcggtggatcgcggcatgaccattgagagtattcgcctgctggaaaagctgggcggtaaaagcgggcatttcaaggcggatgaacaatgagtatcaacgtactgttttttgcgcggtacgccgaagcggtgggctttgattcgctggagatggaaggtgaatttgccaccgtcgacgctgtgcgcctcgcgctggcctcagacccggaattcgccgtgctcaacgaagcgagcctgatgtgtgcgcgcaatgaagagctgtgcagcctcgacgaaccggtacaagccggtgatgaagttgccttcttcccacccgtgaccggaggctgagtatggccattcgtgtgcaggtcgaggcctttgatcccggtgccgaagtcaacgccatgcacgcggccaatgtgggcgtgggcgcggtggtgagttttgtcggctatgtacgcgacttcaatgacgggcgcgacgtgtcggggatgttcctggaacactaccccggcatgacggaaaaggccctggccaagatcgctgtggaagccgagcagcgctggccgttgctcaagctggaggtgctgcatcgtattggcgcgctggagccgggcgagccgattgtgtttgtcggcacggccagtgcgcatcgccaggcggcgtttgatgcctgtgcgtttgtgatggattacctgaagacgcaggcgccgttttggaagaaggaaaatacaccggaggggccgcggtgggtggagaggcgagagtcggatcatttagctgcgaagcggtggatataaaatacgatgttttgaaggcgctcggcatgccttgtcataaacgggttaaataaggtttgtaaaagcattttttaagttcgtttttctattaaaaaacccccgctactgtcaattgtgacagtagcgggggcttttttttgggtgttaactggctgcaaccacatcggtttttcagtgagactcaaaggttgatgtaactattaatatacacgtcggagtaagaatatggccgctggagatattagtttaaaacggtttgatattgaacttccgagtggccagttggtgacccgtgaactttacgccaatgggcggcatcaatgtcgtgtaagtttgttggttgtcaaaattgttgaagatgagcgcggaatttgggttgaaacgcccttaaccgaagtcgaacgcgcaagtgctaccgtcacccagtttggtacgcccaatcaaccgttaccgccgggttggtactgtgatactgagaaaaataaatttgacgctggcctttggcgtgtcgcggatccaggcgagcaatgtacccaagcgtctgaacctgtcgaacttgtgcctgaagctactgttgtcgaattgatacctcggtatatgcgtgctgctaccagcgttcgtgatgaccccgtaaggtttatggggcgtattactttaggtggtaaggtgtttacgaccaacggcagcgctggggggacgattttttatacctatgtggatatttttcccatgcttgcaattcgcctgttggtacgcgacctgactgagtatcaagacttgaatgccttcagtggagaaattgccaacaacaaaattgatattgatgtctattactggatgccgccgtctggtttgcggttcatcgaaaacaaagggttggataacccggtaccagtcacgcttgaaggtatgtattttcaaacatcgtttatttataactttagtggtggtaatcggaaaaaaggtgggattgtttggaaaaaagacgcgctggggttgcagttgcgagtggatgatgttcaacggcctgccggggataatccctttattgaattcaatcgttacgcaacgatcatgcgggcgatacggtactccggctggattgacagccctaatagcgagcgcatgagtccgtggaggttactggataacttcggttgcgagcatgtatttcggattgcccatggcgacaacagaaatttgttgagattagtggacgttggttttgaggaactggattgataccgctaaggcgactattcgaaggcagagggcaataccgccatgaatatttattccaatgcatttaacttcagtacccacctcaatggggtagtcgacccgcgcaccgggcaatacactgctcgtatcaacctgggcaccttctatccacaaggaccgttggagatcagccgcaatattgcgctgtccttctcgatgttgagttccgatcaatcagggaactatggcgccggatggagtctgagcaataccgagctcgacttggcaacttcatcactcacgctcataacaggtgagcgttatcagatccagagtctaccgtccgtcggtggcacgctggtgattaaggattgcaaacttaaagacgtggttgtcaagcgcatcgccgagtcggaactgcatgtcatctacaaagagggtacggtcgaaatactgggacgccctatcaatcccgggcctttcaaaattatggcgatcgcatttgaaaacggagagcgttggaactttcgttatcttgatggtgggccactgaaacacattcttgaccaaaatgggcaagagatgcttgtgctgacttacattgatggtttgctcgttatggctgatgcgcggattgaggggggacgttatgcgcgtactcgaataaattatggtaatgccaacaatcaactggtgagcgtcacggtgccgtatgacagcacacaggttccgccaggcacggcgtccttcaattttatctatcgccagccgtttcgcaatgggctgattgcgatcactgaagttgaatcacccatggggggtaccgagctaatcagttatgaagagaatggtcacccttatgcagctggtcagttcatcccgcgcgtggcaggttggcggcggacgccgggtgcgggtcagcctcctataggtagtgtctacagctatagtccaacgcataacttcacgggctattattctggaagcgtttatcgacctggcgaggacaatttgtatctggtggtcggggactacgattattggaccgacgaaaccttgatcgacaccagcaacaatgacgccgttctctgtgttacgcgcactacctataacaaatttcatctgttgagcgaggagcgggtgacgcgcgaaggtacgcgagtcattacgacatacgattataacgttgagcccggaaaactgttcccagaccagccagccaacctgcaacttcctcggcagatcaccaatcgtttcgagctggttgcagacggcagcacgcgtgaagaagtacaagtgttggaaacagatgagtacggtaacgttcttagccgcaccgagtcttccggggttcgcatcgagtacagctattatccggtcgcaggtgaaagcggcaaatgcccagccgatccccatgggttgtttcagcgttacttgaagcacgagcgcctgatccccgtaggaggcactcctacagaccgacttaccgagtacacccacacgcgtgtacccaaaaccggcacgcattaccttgtcttgcaagcgtccagtagtcaggccggagtgttccacacggaacaaacatactttgatgcccccgtggagttgttaggccgggtgaaaaatacgtccaacacgattgatgggctgtcgttggtcagcgaattcagttatgccatggcgggagacaacgtcagtgaaacccggcgtatgcagggccgcgaagcgcaatggctcgaatccacacgcacactctcccgaaccaatcgacgcctgctctcgatgacaagggatggtggcagcacgcttgctttgacgttcgatgccagtggccgtttgacggcggaaacggtttcccccggtaaaccccaacaagccgcgcaccgctatgcctatcattttgcaacgcaagcaaagcgtgcccatctgatttccaccgacgcccaggataatcaggtcatcacctacttcgatggcctcggacggcaggtgtccgaagcccaaatattgggcgaggagcaggagcgcgtcacccggacctggcgctatgacgcacaggggcgaaccgttgcagtggtcaataccgactacctacctgacggggtgcgttcgctggcaagcacgtatgcctacaacccttggggcaacgccagccgtgtgacgcataccgatggtcgtgtgctgatcgatgagtacgatccgttgcttaatctcaagatcgagggggtagagggcgcagagcgcttgaagacttatttcaatgagcataaccagccgatcctggtggagcgtctcgatacgagcgacaacagtgtcaaagtggagtcgcgcacatacgacggactgggtcgatgcgtgtcggtagtggacgtcaacagcaacctgaccgagttcacctatgatgccttcgaccgccaagtgacggtccatcaaaagccggtcgatggcaccccacaccgtttgcgccaaatggactacgctcccggcaccagctgtgcgtcagtcaccgcactgacggttgaaggcaaactgttgggcgcccgtacttatgacagcctggggcgcatcaccagccaggcgcacggcgcgaggcgagccacgacttgggagtacgaggcaggttggatggaacctgtcgcaatggtctcgcctcgaggcgcacggcaacgcctgacttacgacaaggaattggatgtgccaacccggatagaaatgaccgggttgccggagagtacctatcaacatgatcccgttggaggggctgtcacgcgttcggagaccaatgggctgattcatgagtttttccaagacgtgaatggccatcccgataaggaaattcaaactgcagccggcacgacagtgaccacactttttggctattctcctggcgggcgtctgctgcatcaaacggctgccgatggtcagcgtagtgagctggagtacgacgcccaggggcggttttccaggatgatcaccggcgctatggtgattgagcaaagctacgacagcctaagtcgaccgcagaacctgaccactggttatgacagcacgcagatagtcaccaaaatgtcttatgacgctctgggaagggaggccgagcggcgttttgagcagaacggtacgctgcttcaggtaatgaccagtacctatcacgtcaataatatgctggcgacccgcttcctgcgcgacgcgagttcacgagtggtgatcgcagagacgttcacctacgatgcctacctgcggctcaagacctaccgctgtgaaggcctcgaacgccctcaggatcaaatggggcgcggtatcgccgggcaggacttcagctttgacaatctcaataacattacccgggttgtcacctcctttgctgacggcacccaagacatctgcgcccgttatttcagcggtctggatcccactcaactgacgcgcctgacccatacacttccggcgcaggatgtcacgctgacatatgacgcatcgggcaatctgttgattggcccttccggccaggtctacacgtataacgaatttgaactgctgaccggtgtacggatcgctggtgtccaatacagctaccagtacgacgcagaatcccgccaggtactcgcttcacgcaatagtgaggtgccggtgatgctggcatatgcaggcgagcgtcttgaaaccttggttgaaggtaataagaaaatccgctatttcagcagtgaagaccaagtggcggcgcgcagtggtggtgtggacgggccgcaattgcatgccaacgatgcctctggcagcgtgcgtggtatttctgcgccgggccaggctcatgtgcggcggcactacacaccttatggcgacgccaagcttgccctggatgatggcaaagcccgcagcctggctgacctgcaaatgccagcgttcaatgctcagcggctggacgcggcgacgaacctctacgtgctcggcaacggcatgcgcgtctatgatcctgccctgatgatgtttctgcagcctgatcccttgagtccatttgatgagggcggaatcaacagctacgcgtattgtgcaggtaacccgatcaacctgatcgaccctagcgggctatggccgaactggttgaaatgggcgctgaccggggcggctttggtcgcctcgatagtggcgttggggtttgcggctcccgcagtggtagcggcggctacggcgtacacggctgcggcgtctgcggcggccgtggctgcaaccgcgacaaccgcagccacagccacagcgtctgcgatggctctggcctccaaggtagccttagcgactgcctcgacgttgggcgtcgtgggtggaacattgagcaccgccgcattgggtatcgccgaggtcgacaaaaaaatgggctgggaccgctcacaccatatccaaaatctcgggtgggcggctttagggttctctatcgcatcatgggtagccagcgtcgcgggggcttatacgtcagcaagcttggccttcaatgccgccgtgaaagccggggcagccaaggattttgtcaagtacgccagcttttttgacaccccggtgggcagtggccttgccgcggccggcaaacgcatggtgggcctgacctataagtttacagataaatggggggtcaccccttacagccaagcgtttggtgtcacccgttttgccttgagaactaccaattttggtcgggcgatcgaggccaggatcaagagcgcgtcgccttcacctgttcctgagtccgaccaatccggatctactgcgtcggctcagcctcagcctcagcggccagcggccagcggccggcagccggtttgccgacttgcccgccagtggcgctgattactatcaggcattcagagatgaggcgacgcgtatccgccagcctatgctgcggggctgatacaggcgtgggtatgaacgcttgagcgcttgatgcaaacgaatgtgggagggggcaagtcgcctagccccttccacatgttttactgcatttgggcgctacggccgcttgcgctccaccgcccgcaacaaatgcgtcggcggcgtctcacaactgatcttgcgccccaacaacgcctcgatggacggcaactggtacgagtcatcctcgcccgcaaagctgatcgacacacccgcagcccccgcccgcccggtacgaccaatacggtgtacataatcgtccggtacttccggcagggtgaaattgatcacgtggctgatgccgtcgatgtgaataccacgaccggccacgtcggtggctaccagcacgcggatcttgccttcacggaagccttccagggtcttgatgcgcttgtgctggggcacatcgcccgacagttgcgcggcgttgacgccgtcgcgcaccaggcgttcttcgatgcggcgcacttcgtccttgcggttggcgaacaccatcacgcgctcccaaccgttgtcgttgaccaggttgtagagcagtttgtacttgtcggcaccggcgacggcatagatatgctgctcgacgttttcgctggcaacgttgagtgcttcgatctcgacgatggacgggtcagtggtccactgcttggcgaggttcatcacgtcttcggtgaaggtcgcggagaacagcagggtctggcgctcggttttcggcggggtctggcgaatgatctggcgtacttgtgggataaagcccatgtcgagcatgcggtcggcttcgtccagcaccatcacttcgaccatgtccaggtgcacgtcgccgcgctggttgaagtcgagcaggcggcccggggtggcgacgaggatgtcgcaatggcgggcttcaaggtgcttgagctgcttgtcgaagtccatgccgcccacgaacgtcatgacgttgaggccggtgtacttggtcaggtcggcggcgtccttggcgatctgcaccaccagctcacgggttggggcgatgatcagcgcacgcggttcgcccatgtagcgttctttgggcggcggcgtttgcagcagttgggtgatgatcgagatcaggaacgcggcggtcttgccggtgccggtctgtgcgcggccgatggcgtctttgcctgcgagggtgaagcccagcacttgcgcctggatcggtgtgcagtacgggaaacccaggtcctggatggcgtgcatcagttccggggccagtttgaaatcgtggaagcgggtcttgccttcctggggttcgacgacgaagtcttcgagtttccagggggtcacgggcggcttgggcgcacgttcgcgacggggcttggccacaggcgtcggggcgggctcggcaggctttacctgttcaggcggcgtcaccgtggttttgttcggtgaggcggcgggcgcgttccggccgggctgttgaccgtcattgcggttgccgggcttgggggcaggtgcactgggaacaggcgcgagcggctcagcctcgcttttgccgaacatcttcttgagtgctttgagcacggtcatctcattaattgattaaggaatgtacgccggccagtgtaatgcaagaatcgggcgcggcgtagtgcgtctgtcatacggctacataaacacggggttcagcgcagccgttcagccagccaggcgccgatatcgtgtatctcttggggtaacacttcgtggcccattgggtattcctgccatgtcacggtgacaccacggcctttcaaatgctcgtaggcgctgcggcccatggcgttctgaaccacttcgtcgtactggccgtgcaggcagagcgtagggatgcgttgctggctggcggataattgcaggtcattatcgaaggtgggcgcataggtggagagggcgatcacaccgcccaagggcccctcccatttcttgaacgcggtgtgaaaaaccacggcgccgccttgagaaaaaccagcgaggaaaattcgcgaagtgtctattccggttctctgttgtgtctcgatcaggtccgtaaccatttttgccgacgtttccagttcttccaggctgatcgaacgggccgggctcatggccttgatgtcgtaccagctcggcatctcgtagccgccattaatcgtcaccgggcgcgtgggggactggggcaaaacaaagcgggtgctcagcaaggtttcctgcagcgcttcggccaccggcaggaagtcgtagcgatcggcgcccaggccatgcagccagataacgcaggcgtctgctggcttggcgggctgaagaatcaagggttcggtcatgtctgctccatagatgtgcgggcgctccgattaggtgcgtcggaacggtgcgcgacaggttgatctgttaagagaatgtcgcaaggctgaatcttttgccattgaagcgcagttgcagccactcggccaagactctggtacgcgccttgctatgtgtatctcgatgtcagaactctcctaggacggtaacactatcagtgagtgccgctcgtgggaaagcaactgcaattaccgcaaaaacctcatgctgcttggccccaaaaaaaaccaacacgggtcgatatcgcctcataagggtgcgctgaggttggagctccgacacaacaagagcaattggaggtttgtaatgaaggtattgaaatccaccctggccatcttcactgcggcggctgtactgggtgtcagtggttttgcccaggcgggtgccaccctggacgccgtgcagaaaaaaggctttgtgcagtgcggtgtgagtgacggcctgccgggtttctcggtgccggatgccagcggcaagatcctcgggatcgacgctgactattgccgcgctgtggcggctgccgtgtttggcgatgccaccaaggtcaagttcagccagttgaacgccaaggagcgtttcaccgcgcttcagtcaggcgaagtcgacatcctgtcgcgcaacaccaccatgaccagctcccgcgacgcgggcatgggcctgaaattcccgggcttcattacctactatgacggcatcggctttctggtgaacaacaagctgggcgtcaagagcgcgaaggaactggacggtgcaaccatctgcatccaggccggtaccaccaccgagctgaacgtttccgactacttccgcgccaacaacctcaaatacaccccgatcaccttcgacacttccgatgaaagcgccaagtcgctggaatccgggcgttgcgacgtactgacgtccgacaaatcccagctgttcgcccagcgcagcaagctggcttcgccgaaagactacgtggtgctgccggaaaccatttccaaggaacccctgggcccggtcgtgcgtaatggcgacgacgagtggctggccatcgtgcgctgggtgggctacgccatgctcaacgctgaagaggccggtgtgacctccaagaacgtcgaagctgaagccaaggccaccaagaacccggacgttgcgcgtctgctcggtgctgacggcgaatacggcaaagacctgaaagtgaagaaggactgggtggtacagatcgtcaagcaagtgggtaactacggcgagatgttcgagcgcaacctgggcaagagcacgccgctggaaatcgaccgtggcctgaacgccctgtggaacaacggcggcattcaatacgcaccccctgtgcgctgatcgctgatggttctgtcacccggtaggccaactgccgggtgatgttctgttccattattttcggggcacttcatgcaaaatcaaatcggcgcacccaagcagaagctcagcttcagcgaccccaaagtgcgtgcgtggctgttccagatcatcacgatcgtggcggtggtctcgctgggctggtacctgttccataacacccagaccaacctgcaacaccggggcatcacctcgggtttcgactttcttgagcgcagtgccggcttcggcatcgcgcagcacttgatcgactacaccgaatcggacagctatgcccgggtgtttgtcatcggtctgctcaacacgttgctggtgaccgtcatcggtgtggtgctggcaaccctgctcggcttcatcatcggcgtggcgcgcttgtcgcctaactggatgatcaacaagctggccacggtgtacgtggaggtatttcgcaacattccgccgctgctgcaaatcctgttctggtacttcgcggttttcctgaccatgccagggccgcgcaacagccataacttcggtgacaccttctttgtcagcagccgtggcctgaacatgccagcagcgctggcggccgatgggttctggccgtttgtggccagcctggtggtcgccatcgttgccatcgtgctgatgacccgctgggccaacaaacgctttgaagcgaccggggttcctttccataaattctgggcgggcctggcgctgctggtggtgatcccgacgctgtgcgtgttggtcttcggcacgccgctgcattgggaaatgcccaagcttgctggcttcaacttcgtcggcggctgggtgctgatcccggaactgctggcgttgaccttggcgttgacggtgtacaccgcggcgttcattgccgagatcgtgcgctcgggcatcaagtccgtcagccatggccagaccgaagcggcacgctcactgggcctgcgcccagggccgacgctgcgcaaggtcatcatcccgcaagcgttgcgcgtgatcattccgccgctgaccagccaatacctgaacctggcgaaaaactcgtcgttggccgccggtatcggttatccggaaatggtttcgctgtttgccggcacggtgctcaaccagaccggccaggccattgaagtcattgccatcaccatgagcgtgtacctggcgatcagcatcagcatttctttgctgatgaactggtacaacaagcgcattgcgctgatcgagcggtgaggacacacccatgactacgcatacgttcaaacctgacatgccaccgccgagcaaagtcttcgggccggtggcctggatgcgcgccaacttgttctcgagctggctcaatacactgctgaccttgctggcgatctacctggtgtacctggtggtgccgccgatcctgcactgggccatcctcgatgccaactgggtgggcaccacccgcgccgactgcaccaaggagggcgcctgctgggtgtttatccaacagcgcttcgggcagttcatgtatggctattaccccgtcgacctgcgctggcgcgtggacatgacggtatggctggccatcgtgggcgtggcgccgttgttcatctcgcgtttccctcgcaaggcggtctacggcctgggctttctggtgttgtacccgatcatcgcctactgcttgctgcacggcggcgtgttcggcctgagcaatgtggcgaccagccaatggggcggcctgatgctgaccctggtgatcgccactgtcggcatcgctggcgccttgccgctgggcattgtgctggcgctggggcggcgttcgaacatgccggccattcgggtggtctgcgtgaccttcatcgagttctggcgcggcgtgccgttgatcaccgtgctgttcatgtcgtcggtgatgctgccgctgttcctgcccgagggcatgaacttcgacaagctgctgcgggcgctgatcggtgtgatcctgttccagtcggcctatgtagccgaagtggtgcgcggtggtttgcaggcgattcccaaggggcaatacgaagccgctgcggcaatgggcctgggctactggcgcagcatgggcctggtgattttgccgcaggccttgaagttggtgatccctgggatcgtcaacaccttcattgccctgttcaaggacaccagccttgtgatcatcatcggcctgttcgacctgctcaacagcgtcaagcaagccgccgccgaccccaaatggttgggcatggccactgaaggctacgtgttcgccgctttggtgttctggattttctgttttggtatgtcgcgctattccatgcacctggaacgcaagctcgacactggccacaagcgttaggagttttttgatgagcgaagcaatcaaacagcctgtgagccctgaaggcattatccagatgcagggcgtcaacaagtggtacggccagttccacgtgttgaaagacatcaatctcaacgtcaagcagggcgagcgcatcgtgctgtgcggcccgtcgggctcgggcaagtccaccaccatccgctgcctcaaccgtctggaagagcaccagcaaggccgcatcgtggtcgatggcgtggagctgaccaatgacctcaagcagatcgaagcgatccgccgtgaagtgggcatggtgttccagcacttcaacctgttcccgcatttgaccatcttgcaaaactgcacgctggcgccgatgtgggtgcgcaagatgcccaagcgcaaggccgaggaaattgccatgcactacctggagcgtgtgcgcattccggagcaggcccacaagtttccggggcaactgtccggcggccagcaacagcgtgtggccatcgcccgtgccttgtgcatgaaaccgaaaatcatgctgttcgacgagccgacctcggcactcgacccggaaatggtgaaagaggttctggacaccatgattggcctggccgaagacggcatgaccatgttgtgcgtgactcacgaaatgggctttgcgcgcaccgtggccaaccgcgtgatcttcatggacaagggtgagatcgttgaacaggcggcaccgaatgacttctttgataacccgcagaatgagcggacccggttgttcttgagccagatactgcattgatggaaggttaaaaaaaccccggcctggtgccgggtttgtttttgcctgttgatctgctcaggaggcttgggccgcaagttgttgctcatcttttgctatgagcaggcgattgaggtcatcgccgacattgagcgcctcgatctcggctagtagatgcggatgcttatccagtaggcgcatgagtgtaaacaatggttcaggagggaaaacctcagccctttcgtagcgagaaaatgaattttgcccacgcacagtcaaaagcttcactgcgtccttctgagtgagatgcagtttgcgacggattcgcttcatttcggcagcgatgatttttctgccatcaatcaataattggtcactggcgtcggaataacgctctgcgctgtcatcgtcatgatcgaattcgatttccttacagacctggcattcccagcccgcgatgtttggaatgtcgcgcatcatgccgcgcgtgttgatggtgaaggtgcgaccttcgaaatgctgcattccctcatgggctccgcaattcacgcattgttgggttttcataaggttttctccttgaaggagattacgggagctccaccgcttgagcggtaagtcaccttgatgtaaatctccgtaccgtacattttgatgagatagacgtcctgccatacccgatggtctgaataggttgtcattgatttgtacaacattcgcttttcaagggcgcagaccgccaaccgcatctggccgatactcaattcaagttgtcgagcgctctcccgcgcacttgccgtaaatgctccgttgcccagctggatgacttgcgccttgatcagggccaaatcgtaatgaggtgtgtacttttccataagacacctgagtccaataattaccctctaagggtaattttaccaatcgaaaatactgctccttttcctgcctaagaaccctagtgcgttgcctttgtaggtaactccgaatagcctgtaggaaaattcatcctatgattggacgaaagcgctaaacccatgacagacatcgccccgctgatcaaacgctccctggtcgaccaggcgctggagcaactgcgcctgcgcatctcccaaggcgtatgggccatcggcgagcgcctgcccaccgagcccgagttgtccgccgagctggggatcagccggaacaccgtgcgtgaagccatgcgggtattggccttttcgggcttgatcgaaattcgccagggcgatggcagttacctgcgctcgatgaccgacccactgggcacaatgcgggcgttgtcccattgcacgctggagcaggcgcaggagacgcgccagattctggaagtggaggccatcggcctggctgcattgcgtcgtaccgaagcggaccttgaggcattgcgcaaggcgctcgctctcagcgccgagctttatcacggcgacctggaggcctatatcagcgccgacctgaagttccaccagcacgtggtggatgcggcgcacaacccggccttgagcgagctgtaccactacttctcggccattgtcggcgcgcagctgcgccagaccctgaaccgctcaccgcgacgccaggcggtgttcgacctgcatggagcgctgctcgatgcggtggaacaacaagacccggaccgcgccaaatccctctgccggcagttgatcaatgaaccctgaagccccacgcaagaccgaactcgaagaactgttgatcgacgccgaagctgacgacgacagcgtgcagcaggcgccgccgagcgtggttcggccatggctgctgttgctgggcctggtgttggtggccttgaacctgcgcccggccttgtcgagcttgtcgccgttactggcagaggtttcgagcagtttgggcttgtccgccgccaaggccgggttgctgaccaccttgccggtgctgtgcctgggcctgttcgcgcccaccgcgccgatgctggcacggcgttttggcgccgagcgcgttgtgcttggcatcctgttgaccctggccgccgggatcatcctgcgcagttcgttgggtgaggtggggttgttcctcggtagcctggttgcaggggccagcatcggcatcatcggtgtgttgctgccgggtatcgtcaagcgcgacttcgccaggcaggccggtgccatgaccggtgtctacaccatggcgttgtgcttgggcgccgccatggcggccggtgcctctgtgccgctgagccacgcctttggcgacagctggaagatcggcctgggcttctggatcctgccggcgctggtggcggccctggtctggttaccccagattgggcagaagcacggcgcccatcgtgtggcctatcgtgtgaaagggttattgcgtgatccgttggcctggcaggtcaccctgtacatgggcctgcaatcgtcactggcctacatcgtgttcggctggttgccgtcgatcctgatcggccgtggcctgagcgcgaccgaagccgggttggcgctgtcgggctcgatcatcgtgcaactgctcagctccctggccgcaccgtggctggccacgcgcggcaaggaccagcgcctggcgattgtggtggtgatgctgctgaccctcggcgggctgttcggttgcctgtatgcaccgctggagggcctatggggttgggcgattttgctcggcctggggcagggcggcaccttcagcctggcgctgaccctgatcgtgttgcgctcgcgcgattcccatgtggcggccaacctgtcgagcatggcccagggcatcggctacaccctggcgtcgatggggccgttcgcggtcggcctggtgcatgactggaccggcggctgggcagccattggctggatcttcgcggtgatcggcctgggggccatcattgccgggctgggcgccgggcgtgcgcgctatgtgcaggtcaccagcgagaaggtttagagatacaccacttccagcgtggccgagccatcgagcggggtttccacactcaaatccagattctggcgggcattgatcacggtctgcaccgtgacgttgccccccagggtaccgatggccgtgggcccgctgacgctgccctccacgtcggtaaaccccaggtagcttcgcgagccaatatcgatggggttgagattggaggtgcgccacgccaggccaccggtggtggactcggtgccatagacctgcgcggtgttgctggcctgggtttgccgcgggtcgaaggtcatggagtaaacccccaggcggttgccgctgctatcaaaccccagcccgtagtaaatctcgctgttgaccatggccgagccgtcgcggttgtcgcgcatgcgaagggcgtagcggacggggccattgcaggcgatgccgatatgcagcgtcttcaggggcaggcgcgtggcggtctccaggttcaggtcttgttgggcaatcttgccgtagtcgatcaggccaccgctggaaagctgcggcaagcaggcggcggggacgatcagtccgtggacgctcaggtccactgtcgaggcggccagcaccgagggcgcgcaggccagtaacaccaggctggaaaggatgcgggttttcatggggcggactccttacaggggggctcaggggtagacgatttcgagcgtgccggaaccgttgatgtgcaccacgtcacgcaagtccaggctttgcatcggcgccaggtaagtcttgatgcgcatcgtgccagtcagggtttgcagggcgactggccctgtggtaacgccggttttgtcggtaaagcccatgatgctgttggccgccatggggatctgccgcgcggtggaactgctccatgccacgccattgctggtggagtcggtgcggtacaaggtggggaaggcatcggcgctgaattcggccgggtcgatggtcaggtaaaagcgcccgatcttgttgcggctggcatccaggtccaggccataggccgtttcatcggtgccgcccgtggccgagccgtcgcggttgtccttcatgcgcagggcgaagcggatgggcgcgtcgcaggtcacgctcaggtgcagtgtgcgggtgggcagcggtgtttcagtgctggcgttgaggtctttggcgtacagagtgccgtagtccaccacgccttggtcggacaagctcggcaggcaggcgataggcgcgaagtgcgcgcgcagtgtcagctcccggtagcgtccatggtgtgcgccgtacagcatgccggagacttcccaggtggtggcatcgcgcacctgggtggcggcagggtcggcccaggcacgcaggctcatttgcagtgccagggttttaccggtgagcaccgtgccccgttcgaccggtgcgatgccgtggtcgggtcgccattgcaggacgctgccagtggcgacgggcgcctgccccacggcgggcagcacccccaactcgaccgcgcggccgtcgagcagggcattactgacttcaatggcatagctgccgtgctcggtaaactgccagcgctgcgggctggcggcttgcgcacggtagaacaggctgaggtcttcggcctgggggcaactgacggtcacactcagtcgacgctcgccgagcaggcgttgcggtgcgctgtcgctttgcgccaagcggctcatcaggccgaaatccagcaacggctcactgacgttcagttggcattcttcaaaagcctgggctgtgccggcggcgccgatcaacagccccaggcacagttgacgcaaacagcttgcaaggggcatggcgggaatcctcaaggtgcgtgacagcgtgcgggggctgtttcgaagtacaccgaggggtcggctttttccggcagcgagtaacgcaactggcaacggcgcccttggggcgtggttatccacagcgtcgattggcccagcacattgggtagaaacacctggctgccgtcctgcaccagggtgatgaattcaccattggcactgctgacggaggcacccgccggcaacggcgcgccctggtcggtgctgacggtgagcagcaggcggcgggtcaggccgacgccaaatttgacgcgctccacggcgccacggccggccgaaaccatggccaggccattgttgatatcggcattgcgcggcaatgaacgggtttgcacttccaccgggctgcgcccgtaggcggcgacttgcggcaccacggcctggccttgccagtcagtccacaccgggccgctgggggtggtgagtttgatgccgctcatatcgccaaccgacaccagcgcgaaggtgtcgcgcaccgggtagggagaaaaggtcacgccgtcgccatgcagcaccacaccgccgcgagcaccgccttgatagctggaacgctcggcgtcggagcggctgtaactgacatccagctggctgtagcgcggcagcgcggagatgcccagggtggtttccacttgatggtcgctgctgtcgtgctcggcgctgacgcggtagctgagttggtcgtcgatctgttcggtgatgcccaggccggtgcggttctcgccaccggagttgcgcacccagctgcgcagccggcgactctcgcccagcggcacgctgatattgaggtacaccgcgttgtcctgctgctggcggccgcccatttgccactcggcactggccgacaacgacaccgcaccgatgctcgtgccccaggaggccagcgcccggctgctgctgtcgccggcaaaattggccgagcgtgaaacccctgcactgaatgcacccagttgggggtgcgaccagccgaggttgaggctttgctggtcgcggtagcgcgaatcacggttgctgtcgtcgcgcgtgtaagtgctttcttcgagttcgcggtagccgatgctgcgccaggaattggcggcgctgatcgaccattgttcgcccaggcgctgggaccaggacagatcagtctgcacaccggagaccttctctcgggcctggctgttggacacttgcgtggacagttggatctggctgtccagccacggtaaccagcccaggctggcgcccaccgaacggtattgacttgccgccagcacgcccgtgccgagggtcaactgcggatgcagggcaccggtccagccgccactgattacccacggatcctcgccttcggcatcgcccacattacgcactcggcccgctgccacggagtaacccggggctggcaacccgagcccgagcatggccgctggcacggtgaagcgccgttcaccgccgacgctctccttgaccgtgacttcgacgtccgagcgcgtgttcaagcgacgcacatcggtcagggcaaagggcccggcgggcaccacggtggaatgaatcaacgcgccgttctggcgcacctccacctgagccgggctattggcgatgccctggatcagcgcgccctggccttgttcttgaagggcgtgctcggtgagcacctgcacgccggtgatctgcgcgccggacagcaccgggttgtacaggttgatctgcccggcttgcagcaccgcctggtggctggcgaaggtgcgttgggcataggcttgcaggtgggtgctgcgtgacaggccatcctgccaggtctgcacctggcggctgcgcacgatccagtcgccggcattgaaccccacctcggtattggccgaaccaaagcggctggcgtcatcgccgaagcggttgtagaagccactgaggtcgtagttgagcagcccggcaaacccgccggtttcgtagccggagatgtcctgctgtacggggcgcagggcgtcggtgggcaccaccagcgacaccgtcaatgtcgccgggtctggttccacaagggtttgcgggtaccgcgcaagaaaatcatggcagccctcggtttcaccaggcggcaccagattggccgcgtccagcaaagcgcggtcaaagcacagattgccctgctgatcgaagttcaccgtcaaccgatcacggcgctgaccgttgacgcgcaggctgacggtgtgttgcccggctgcgtaacgcggtgcggccagcaacaggctggccagttgtgggtcgataccacgttgttgcaaggtctgggcatcgaagccggacgagctggaatcttcggcgcacactttggccggtatgagcgcgcacagcagcaataccagcgccagggcagggctggcaaagggatcgggcacggcttcgccgtcacggtaactcaatactgttttcacgcaaggtactcgaatagtgaacgcgcaggccttgtgggccgggcgttctggtgacgatcaacaagccgtcacttcgttactcaggcggcgcagggtggtacgccgcctggggtgttccgtcagaagctgattggtgcgtcgtaagccttgaccgcgaacccgtacaccgtggccggctgcagcctgaccgtcttggcctggctgctgctggccggcacgctcaaggcttcgccgggcagcacataggtccgaggcagcaacgccttgccgtcaccgggcagcagttgcagctcctgcgccagacgcaccacgtacggcgtgtcgttgcgcacctgtaactggccttcgcgcagtgtccaggtcaggtcggtccagggcgtgcggttgggggccaggcccttggggtgcacgatcaccggcaggttctggcgcacggtcacacctacgcgggcatgcccgacggcggtggcggcgcgtccctggggcatgccttcgaacactgcgcgtttaagcctttgggtgagcaacggctgccggttttgcagaatgaaacgcaccagctgggacttggaggcttcgacccgcgacagcggcggtgtcaccactaacagcggttcggtgtcttccggaatgtcctgcaaggtcacatgcagcagggccagctggctgtcggtgttggtcaccgacacggacgcttcgccttcggcctcgttcacgatcaccacggaggtgtccgggaccataccgtcggcttttacctgatcgccgagcatcaagagcaaggcaatcaggccgacagcggtgtttgagaatgtcgtcgtcatgacgggtttccattagccaaaaaagggggcagtcagaggtagcgcaggtccaggacgatggcgccgtcgagcggaacttcctggtccagggtcaggtactgggaaaaattgatcgcagtgctcacctgaacctggacggtcagctggccgatgaagtccggttgtcggtcaccgactggcgcgaaggccatgtaggtgcgggggtaggcattgggctcctgggaccaggtttcgccgttgtcgctggaagccaatgcttgcaggggctgcgcatcgcccactgcgttgcgataggccaatgccacggagcccaggcgttcttcgggcacatggatgttcctgcccagcccgtagaaataatcgggggccgacgaggagtcggcgcgattatcgaggcccaccagcgcaaacagcatcggcctggcgcactgcacacgcaggtcgagcgtctggatcggcagtacggtgaactcgtcggcattgaggctgtgagaaggaatcttgccgtgatcgacggtgccttcattcgtcagctcgatatggcaggcgtccggggttacccggccggtcaccgtgaggtcgacggccgacgcaccgtgggcttgggtcatcgctgtcaggccaagcacgatggcaacgctacgcccccatgccgtgagcacgggcagtgccagacgccgcccatgcctgtcggtgttcaagggatgagcggccatgggttagaggtacttcacttcaagggtggcggagccgtcgagggtcacctcattgctgaggtccatgccggcggtggccagaatgaaggtctgcacctgtaaatcgaccaccaggtctttgaccgccagtggctggctatcgtcatccatcgaggcaaccgacatgtacaggcccggatcccagaacttttctttgaaccaggtattgccttggtcggacgatgcgatgggttgcaccaccacgccatcttcggcaagcggattggctagcgtgaggttgtacccgcccagcttctgggtttcgttgataaagcccaaaccgtaactcgaagagatacctgaggaggcacggttatcgaccgagtgcagggcgaactggatcgcagcgtcgcaattgaccgccatgaccagggtgtggttgccgatgactgtcgggttgtccgggttcaggtccttggcggagatcttgccatggtcgatcacgccaccaccggacagggtcggtgtgcaggcgctgggcacgatcaggcctttgacggtcaggtccacgctggatgcggcgaaggtggtggccgagtggagcagcagcacgctggcggccagggtggtcaatcgggttttcatcgggaggctccttagaggtaattgacttgcacagtggcgtggccgtcgatgggcacttcgtcggtcagcgtcaggttgctggcgggggcgatgtgggtgatcaggcggatttccgcgtccaatgcctggatcgcgatcggtgcaaggccgtcgccgtcggcgacggccgtcaacaagctatggctgagcatcaccgaggggatccaggtcacgccgccgtcccgggaggtgatggtgcgtaccggtacgccatcggccaccgggctatacaggccaagcccggcgtcgccgactttttcatcgttgggtgtcatgcccaggccatgccaactgaagtggctggcggcagtgcccgcacggttgtcgatggtgttcagggtaaaaatggttggcccttcgcaacgcacactcaacaacatggtttccctgggcaagtcggtgtaggtgtcggcgttgaggtctctgaccgacaccttgccgaagtcgacggtaccgccgccggagaccacgggggcgcaggcactgggggtgatgacccctttgaccgtcaggtcctggctactggcggcccataccgggccggcgccgatcagcaacagtgtggcggtgagggtagtgagggggctaaccatggggcacgtcctgtgggtgaggggcggttaaaggtatttcacttcaagggtggcggagccgttgatcggaacttctgtgctcaggtccatgccggctgtgggggcgataagggtttgcaccatcaggtctgccgtgacctgctggaccggggagggtgcccaactgccggaggaacggtcgccaaacgaggcgtggtaggtaatgggccagacgtcgcccgggaagctttcccgccaggtgaggccgttatcggacgactcgatcagggtgattgccgcgccgtcagccaccggattgccgagcaccagtgtgtacccgcccaattttttgccgctgaccaggcccaggccatagcggttcatcgggtcgggggcgtcgcccttgttgtccgtgcccttcagggccagcagggttggcgcatcgcagacgatcgacagttgcagggtgtggttgccgagcaacgtccagttgtcctgtttcaaatccttggccgcgactttgccgtggtcgatgatgccgccgctggaaaggccaggggcacaggcgctgggtgtaatcaggcccttgacggtcaaatcgacgctactggcggcgaacaaagacgtggacatggcgagcagcagggcactgctgagcaggggcatgcaggttttcatgtgagaggcgtccatttacaggtatttgacttcaaacgtcgcggaaccatcgatcgcgacttcgtcggtcaatgtcagcccttttgcgggggcgatcactgtgtagagcgtgacgtccatgatcgcgtccttgatcgggtgcggcgcccagccgctatcgccacgactgcccagtgccaccaactcgttgggcgcgatgccgtcgtcaggcagcagcgttacccagtggccgtcggcgttgtacatggccagcagcgtggagggggtttcggcgacggggttgctgaaacccaactgatacatgcccagcttctggttttcgttgatcatgcccaggccaaaggagtagccataaatcgcagagccagctcgattgtcgataggctggatggcaaacagcgttgccgcatcgcagttgacgctcagtggcagggtcttgcgctcaagcggggtgctggtgtcgatattcaggtcttttgccgcgatttttccgaagtcgacgtcacccggcaggctcggtgtacaagcgctgggcgtgatcaaccctttgacgctcaggtcgacactgctggcggcgaacactgaagatgtcatggcgagcagcagggcactgctcaacagggatacagggttcttcatttccaattgttccattgcagtctggcagatagaaacgcgtacaggtcagcgctcggccctgtgtgggcgagtggttggcgtggcggcggtctcagtgtttttttgcggtgccggggagtggccatccgtccctcttttggggtgggcacaatttagcgagggggctgcgagggggaaatacaactaatacgacattggcgggttgtggtgtaagcgcagtgcgggacggtagattttcgcggcgtttttcgtagttgttgtatcggcttgaagccattcaaaaggatataggttgaaagtcgataacgatcaaaagggtgtgcctggcattgctgtatcagtgccgcggatggctgccgaattaatcaccacgaagaggtactgatgggttcgccaggaggttcaaccgcaggagcgagccggacagtcaaaccgcctttttgtcccccgccccattggcagtacttgaatgttctggtcgtggaggatcattcagcctatcgcctgttgctgggttggctgttgcaaaaactggggctcggacacgcgctggtcaccgatggcttcatgggattggacacctttaccaaccggcccttcgacctggtgatcagtgattgccggatgcccttcatggacggttacagcatgactcgtgcgattcgccagcatgagcgtgagcagggattgaagcgcgtgcccatcattgccttgaccgccaacctgcaaaacgacagcccccaacgttgccgcaacgccggcatggatgcctggctgctcaaacccctgacccttgaacaactgcacgccgtgctggtgcgctggttgccgggcggcgatggctgttatgtcgagccatacgttgctgcggcgggggcgagctggcccacccgtgccacgcttgtgaccacgtttggcagcgacctggtcgtcgaccagttgctggaaaccctgttgatggaggcctgggaagaccagcgggtgttgcgtcatgcccgtgtgacgttgaacgcgccattgaccgccgagcgtctgcatcggctggtgggcagcctggtgttcctgggcggcacggggttggaaaccagtgccgtgcgcttgatcgagcaggtccaggccgagggtgtcgctacgcacacggcgcaactggaagtgtttgaagcacggctgtgtgcttatctggagtatctgtctgagttgtgaagaatgctgttgcagagcgttttacctggtcgttggtctaagtttggctgtaggtattttcctattgtgttgtagtccaaaaatcagccactactgaacattgggttcggccgcaagtgcctctttgttagcagttgttgatgatcgcaggcagaggtattttgcgcggattcaagttgccatcattcgtgggtgcctatgcttcgagtaattattgctgacgatcaccctattgtccgggtcgggcagaaagtcgtgatcgaggcgaatggcaagtgcaaagtggtcggtgaagccgatggtcctgatcagttactcggcgtgctcagtcgcacgccgtgcgacgtactggtcacggacttcgccatgccaggcggccagcaggccgatggctactgcttgttgggcctgttgcagcgccagtatccgcagttgccggtgatactggtcaccatgttcgccaacgtcgccacgttacgcgcagcctttgcccacggcgccagggcagtggtcgccaaaagtgcttcggccaaggagttgcccctggcgatcaaggcggtgtgtgctggccagaccttcgccagtgaatgcctgcgggtacaactggtggaagccggcactggcgatcaatcccaggagccgcagttgtctggcaaggaacgcgaggtggtgcgcatgctggccagcggcatgaccgtcagccagattgccgcccaggtcaaccgcagcatctccaccatcagcaagcagaaaagcacggcgatgcagcgcttgagtatttccaccgacgttgacttgttcgcctacgcccgcagtactgggatagcgccgtagtgcgcttatttgcgtggcgaatgacagtagccatgacggcttggccggcttatcgtgcgtctactcttttgacgtccgcggagcctgcccatgagtgatgcccataacgccctgatcagccaattctatagcgccttccagcgcctggatgccgaggccatggttgcctgctacagcgatgacgtggtgttcagcgacccggcctttggtgaactgcgaggccgtgacgcaggggacatgtggcgcatgctcaccacccgtgccaaggatttttcgttgaccttcgaccaggtgcacagcgacgagcgcaccggcagtgcgcattgggtggccacctacctgttcagtgcaaccggcaatacggtggtcaacgatatccaggcgcgctttgtattgcgcgacggcaagatctgcgagcaccacgatcacttcgacctgtggcgctggtcgcgccaggcgttgggcaccaagggcctgctgttgggctggacgccgctggtacgcaacgccgtacgcgcccaggcgaacaaaggcctgaaggcattccaggccagtcgttgataaactgcgcgccccttttgccttgccgaacctgtccgtgagtacgcctgaacccaagccttggtatgtctacctggtgcgcgccgccaatggtgcgctgtattgcggcatcagcaacgacccggtgcgccggtttgcctcgcaccaaagcggcaagggcgcgcggttttttctgtccagcccggcagtggcgctggtgtacaccgagcaatgcgcgaacaagggtgaggcgctgcgtcaggaacgcctgatcaaaaagttgaagaagagcgccaaggaatgcctggccgcaaatggctcatcactctgactgataggttcccatcatgcagacaggaccgtttgcgcggtaatctgctcgctcactcgccaagcggaaacccgtatgtctgagctcatcctgcaccattatccgacctcaccctttgcggaaaaagcgcggctgttactgggcttcaaaggcctgtcctggcattcggtgaacatttcgccggtgatgcccaagcccgacctgacggccttgaccggcggctaccgcaaaactccggtgctgcaggtgggggcggatatctattgcgacaccgccctgatcgctcgccgcctggagcaggaaaagtcctcaccggccctgtttccgctgggccaggaaatgatcacccagaccttcgccacctgggccgacagcgtggtattcgcccatgccgtcagcctggtgttccagcccgaatcggtggcggtgcgctttggcaagttaccgcccgaggccatcaaggcctttatcgctgaccgcgctgcgctgttcagtggcggcacggcgagcaagctgccggctgagctggccaagcatcaatggccggcgatcatgacgcggttggagcaacagttgcagcgtgagagcggcgacttcctgttcggcgcgccgtcgattgccgactttgccttggcccactcgctttggttcctcaaggccacgccggtcaccgcgcctttggtggatgcttatccggccgtgctggcctggctgggacgggtgttgggttttggtcatggaaccgccagtcagatgaccgcggagcaggctttggatatcgcccgcaatgctacaccggcacctttgccggatgaggtgttcgaggatttgaacggctttaaggtgggtcaggaggtgaccattgcggctatcgactatggcgttgatccggtggctggcgagttgctgttcgctgggcgtgaagagctgatcctgcgtcgcacggatgaacgcggtggtaccgtgcatgtgcatttcccgcgctgggggtttcgtatccagggcataggtgcctgaagggtgaactaatcactcctgtaggcactacgtggccagtgggggagctggcttgcctgcgatggcggcctgacagtcaacacggttggattgtgtacatatccattgctgcggtaacggccacttggggttccgcctgacggcggctcacttttgaaaaaaaaagcaaaagtaagcaaaacgctcttgccccaccactcggcacctcgcttaggctcggtgtgcccgtaatccgccggcatccctgccggtttaccccccaaatccctgtcgaattccggccagcgtggtttgacggggcgcttgagatcaaaagcagatcaagatcaagagcggctcgcttcgcatcgtggttaccgtctgctgctacagcccannnnnnnnnnnnnnnnnnnnnnnnnnnnnnnnnnnnnnnnacagccgacgctgatctaactgacacaccacgatccaaatgtgggagctggcttgtcgggtcgccgcatcgctgcgaagacggcctgacagtcaacacagctggattgtgtacatatccattgctgtggtaacggccacttaggggtccgctctgacagcgggtcacttttggaaaagagccccaaaagtaaccaaaagggctcttgccccaccactcggcacctcgcttaggctcggtgtgcccgaacacaggcttgaatccgtgggccgccgccacgcgccatccatggcgcggggcggctaacccggcgtcctgccgggttacccacgaattcaagcctgcgttcggccagcgtggtttaacggggcgcctgagatcaagatcaagagcagatcaagagcgactcgcttcgcatcgtggttaccgtctgctgttacaacctccgaagttgtgtagatactatgctgcgatggcatcgactgggtttgcctgatacaccgagttgcctgcatcgcaggcaagccagctcccacaggaaagcggagagcattcagtgccctcgccacattgatagcgagctgttagcgttgccgccattgcaggcttatggaaaacgctactgatgcactttggaaaatggtttcacaccagcaccctgctggtcggcttgagttttgtgctgggcggctgcgccagcgtctcccaaacctccaccccggcaaccctggataagctgttgagcgacccggcgctgcaaggcgccaccgtctcgctgatggtgcgtgatgcccgcacaggcaccacgctgtatcagcacaacccacgcacccggctggtgcccgcgtccaacctcaagctgttgaccacggcggcagccatggatgtattggggccgcagtaccgcttcgccacgcaactgctgagcaatggcctacgccagggcgaccggctgactggcaacctgtacctgcgtggcttgggcgacccgagtattcagtttgccgactatcaggcgctcgccgcgcaattggccagccagggcgtgcgccaggtgcagggtgacctggtgttcgacgacacttggttcgatgccgagcggctgggcgtcgactggtcccatgatgatgaaaccacctactacggcgcgcagatttcagcgctgaccgtggcgcccaataccgactttgatgctggcagcgtgctggtcaccgccaaggcgccgttgcacgtcggctcgccggtcggcgtggagatctacccgcccaccgactacctgcaactgaataaccgcgccgtcagcgggccgggtaacagctatgggatcaaccgtcgccatggcaccaacctgctgcagctcagcggcgcggtggcgcctggccggcagagccagcaattgatcagcgtgtgggagccgacgcaactggtggccaacctgtttgagcaagccttggcgcagcagggcatcaaggtgctggggcgtcgggtgatgggcggggcaagtcctgctggggtgacggtgctggccgagcaccaatcggcgccgttgcaggagctgatcgtgccgctgctcaagctctcgaacaacgccatgtccgaagccgtgctcaaggccatgggccgccagacggccagcagcggcacggcggcggcgggcgccgtggcggtggccgactttctcaagcgcgaggggctggacaccagcgctgtgagccaagtggacggctccggcctgtcgcggcgtaacctggtgtcgtcgcaaaccctcaccgacctgctgctggcggccagcaaacaaccctggttcgacgcctggtacaacgcgctgccggttgccggcaatgccgaccgtatgaccggcggcagcctgggttaccgcctgcgcggcacggctgcggaaaataacctgcatgccaagaccggctccatggccggcgtgtcgtcattgagcggttacatcaccgatgctcacgggcgcaagctggtgttcgcgatgttgaccaacaactatgtggtcgctggcgcgcaggtaaaagccgtggaaaaccgcgtcgccgtggccctgtcccacagcgaagactgattcagggctgatagcccatgcgccaactcacggcccgggtcgccgccagcaagcgctgcgccgccgggccatcttcatcggcatggaacagtgaagtcgggccgaccacggtcatcaccgccgccacgtgcccgaccgcattgaacaccggcgctgataatgcatccacgccaggcatcagcagcccatgtacgaagtgcaggccgcggctgcggatttgctcgcacacgttggcataggcctgatcgtccgccaaggtgtgggcggtgccggctagaacctcgcgctcacgcaactccacggtttcccgtgacggcaggtacgcgctgaacaccagcccggtggacgagctgagcagcggtagtaccgaacctaactgcgtcaccacggtgacggcacgcaccgccggctcaatgtgcaccaccgtcgcgccctggttgccccacaccgctagaaagcaggtttcattcaattcatcgcgcagctcggccaggggcagggcgccgaccttcaatacatccaggctgcccagcgccgccaaccccacgcgtaacgcttcgcggcccaggccgtaatggttggtggcgctgttctgttcggcaaaacccgaagcgatcagggcctgcaaatagcggtgcaccttgctcgccggcatctgcacatgttcggccaggcgtgacaacgaggtggccggcgacagttcggccagggccttgaggatatcggtgccgacttccgccgagcggactttctgtttaccggtgtcgcggggcttttccatggaagggcgagaatccgagagatgaatgggcgtctttatagcttgacggtcgatagtgatcaaattacgttattcgtaactggattacgataaatacaactgaccctcagaggacgatccatgaacctcgaatacctgtcgggcttcggcaacgaattcgccagcgaagccttgcccggcgcgctgccggtcggccagaactcgccgcagaaagccccttacgggctctacaccgaactgttttccggcaccgccttcaccatggcccgcagcgaagcccgtcgcacctggctgtaccgcattcagccgtcggccaaccacccggcattcgtcaagcttgcgcggcaattggccggtggcccgttgggcgcagtgacgccgaaccgcttgcgctggaacccgttggacatcccgagtgagccgacggactttatcgacggcctggtgggcatggttgccaatgcgggtgcggaaaaaccttcgggcatcagcatctataactaccgcgccaaccgctccatggagcgcgtgttcttcaatgccgacggcgaactgctgatcgtccccgaacagggccgcctgcgcatcgccaccgagctgggtgtgctggacgtcgagccgctggagatcgtggtgctgccccgtggcctcaagttccgtatcgaactgctggatgcgcaagcacgcggttacgttgctgagaaccatggcgccccgctgcgtctgccggaccttggccctatcggcagcaacggcctggccaacccccgcgacttcctcacgccagttgcccactacgaagacctgaaaaagcccacaccgctggtgcagaaattcctcggtgagctgtggggctgcgagctggaccactcaccgctcaacgtggtcgcctggcacggcaataacgtgccgtacaaatatgacctacgccgtttcaacaccatcggcaccgtgagtttcgatcacccggacccgtcgatcttcacggtcttgacctcgcctaccagcgtgcacggcctggccaacctcgacttcgtgattttcccgccacgctggatggtggccgagaacaccttccgtccgccgtggtttcaccgcaatctgatgaacgaatacatgggcctgatccagggcgcctacgacgccaaggccgaaggcttcctgccgggcggcgcatcgctgcacagttgcatgagcgcccacggcccggatggcgagacctgcaccaaagccatcaacgccgacctggcgccgcacaagatcgacaacaccatggcgttcatgttcgagaccagccaagtgctgcgcccgacccagttcgccctggaatgcccgcaactgcaacctgcttatgacgcgtgctgggccgcgctgcctgccaccttcaacccgaaccggagataacccatgactcaaccaacgcagacccgcagctgggtatcctcggccaatggtcacgcggatttccccttgcagaacttgcccctgggcgtgttcagtatcaatggctcggcaccgcgcagtggcgtggcgattggcgatgcgattctcgacctgcatgccgcgctggacgaattttccggcgaagcccggcgcgctgtcgaagctacggtggggggccaactgaacgcctttttcgaactcggtcgtggcccccgcgtcgccctgcgcgagcgcctgctggaactgctggccgaaggcagcaagctgcaaacccgcgaagcgcaagtgctgcaccgtgccgctgattgccagatgcacctgccggccaagatcaatgactacaccgacttctacgtcggcatcgagcacgcgcaaaacgtcggcaaattgttccgccccgataacccgctgttgccgaactacaagtacgtgcccattggctaccacggccgtgcctcgaccattcgcccctcgggtacagaggtgcgacgccctaaaggccagacccttccggccggccagaccgagccgacctttggcccatgcgcgcgcctggactatgagttggagctgggcatctggatcggtcagggcaatgccataggcgatgcgattgccattggcgatgccgccgagcatatcgctggtttctgcctgctcaacgactggtcggcgcgggatatccaggcctgggagtaccagccgctggggccgttcttgtcgaaaagctttatcaccagcatctcgccgtgggtcgtcaccgctgaagctttggaacctttccgcaaggcccagccggcacgtccagagggtgatcctcaaccgctgccctacttgctggacaagcgcgatcagaacgcgggcgcctttgatatcgaactggaagtgctgctcaccacggcttcgatgcgtgaacaaaacctgcccgcccatcgcctgaccctgagcaacaccgagcatatgtactggaccgtggcacaaatggtggcgcaccacagcgtcaacggctgccagttgcaggccggtgacctgtttgggtcaggcaccttgtctggcccgcagccggggcagttcggcagcctgctggagattaccgagggtggtaaaaagccgattgaattggcttccggtgaggtgcgtaaattcctcgaggatggcgacgaaatcatcttgcgtgcccgttgcagtcgcgagggctttacctccatcggcttcggcgaatgccgcggtaccgtggtcgcggcgcgctgagagggcagggccatggaactctatacctactaccgttccaccgcgtcgtatcgagtacgtattgccctggccctcaaaggcctggatttcaccgcgctgccggtcaacctgctggtgccggccggcggcgccaaccgccaacctggctacctggcgatcaacccccaagggcgcgtgccggcgttgcgtagcgatgaaggggcgttgttgatccagtcacaggcgatcatcgagtacctggaagagcgttatccacaggcgccgctgctcgccaaggattgggtcgccagggctcacgagcgggcggtggcgtcgatcatcgcctgtgatatccacccgttgcataactccagcacccagaacttgctgcgcaagtgggggcacgacgaggcgcaattgctggagtggatcgggcattggatcagccagggcctgggcgcggtggagcagttgattggcgacaccgggttttgctttggcgaacaaccgggcctggccgatgcgtttctgatcccgcagttgtacgcggccgagcgtttcaaggtgcccttggcggcatacccacgcatcgggcgggtggcggcattggcggcccaacatccggccttcatgcaggcacaccccgccaatcaacctgacaccccctgaaccccctgtaatgatcgttcctacgctcagcgtgggaacgcctcatgtggcgctctgcgtcacggctctaaaaacggacgcggagcgtccagagctgtattcccacgcagagcgtgggaacaatcataaaaaaacaggtaccttgcgatgcacaatcagattgccagctttcgcgcggcactcgacgcccgtccggtgtcgcgctaccaatggttgattctcctgctgctggcactgctactggtcaccgatggctatgacgcccaggtgctgggctatgtagtgccggcgctggcccaggattggggcctggaaaaatccgcgttcgggcccgtgttcagcgccaacctgctgggcctcaccctcggctcgctgttggtgacgccgctggcggatcggtttggtgtgcgacgcattctgctggcgtgcgtgctgatctacgccagcctcacggtattgatggtgttcgccaattccctgaccacgttgatggcggcgcggtttatctgcgggatcggcatgggcggtgcgatgcccagtgccatggcgttgatgtcggagtattcgccaccacgcctgcgcaccttgatggtgacgctggccgcctgtggcttttcgttcggcggcgcggcgggtggctttgtggcggccgggtttatcgacagttttggctggcaggcggtgttcctggcgggcggtgtgacgccgttgctgttgttcccgtttttggtatggctgttgcccgaatccctgccgcgtttgctgcgcgatgcaccgccgtacctgcgcttacacaaggtcacggcgcggatgctgcccgactggcagccaccgtccgccagcgaagccgagaaccgccaggagcagggcagcaagctgaccgtggtggagctgtttcgcaacggctatgcacgcccgacattgctgatctgggcgaccttttttgtcagcctgatcctgctgtatttcatgatcagttggttgccgtcgctattgctcgaaagcggcctggcgttgaacgcagccaacctggtcacctccatgttcctgttcgctggcaccttgggcgcgatcctcatggcctggtttgccgaccgcttgaagagcaaagtgcggctgctgtccggcgtgctggcggcggcagcgttgtgcaccatcctgctgggcttgaaccacgacaacccacgctacctggtggcctgcgtgtttgccgcagggttctgcatcatcggcgggcaactgaccctcaatgccttcgcgagcaacttctacccggcgcacgtgcgcgccaccggcacgggctgggcgttgggggtggggcggttcgggtcgattctggggccgctgtttggcagcttgttgctggcgatgcatatcccggtcgagcagattttcttcttctgcgcgattccggcggtgattgcggcgttgttgattattcaagtgcgggcgccgggagctaacacgctgcatagcgacgttctcaaaccctcactgtaggagcgagcttgctcgcgaagcacgtcaacgataacgcgggcatcctggtttaacgcggtgcccttgcgttcttcgcgagcaagctcgctcctacagttgggagttgggtcagtgcattactgagttgggcggcaggtgccccagccgctcggtcaggcgcagacgctggatcgggtcgtcgctgagcatcaacgcgtgttccaggtcaaagcgttcggcgctcgggcagtccaggcgttgatacaggctggcgcgcgccaggtagtcggaggcgctggcgttgcccagttccagtacgcgctcggcgtccaccagggccgccaacggttcgtcgttggcaaggtagagttggcgcaggttgcgcgacagccgttgcaggatcgcccgtggctcggcggtcagcaggtggtcggcctgcaatttcagcttctccccgtattggcgcgccagcaactcgcgacagtcattagggtacaggcgccggccgccgcaagggtccagcaggtgatcggcacccggtacccgcagcaggaagtgcccggggaagttcacgccgaccatggggatatccaggcgccgtgccatctccaacgcgatcaggcccatggccaagggttgcccgcgtttgcgttgcagcaccttgtccaacagcgcggcggcggggcgcaacggcgtatggtcatcctgggcaaaccccaggtcattcatgcgtcgcagcagcggctggccgagttcatccgccggtagcaggggcatgcccaggctgacctgttgttgcagtgcaccaaggtcctgcaggatcaacgcaggttgcacgctggtgtcatgctcggcagcaatccacagcgcggcttcgaacagcgcggggggtgaacggtccaggcaggcgaaaaaagctgtgcgggggttcatcgagttctccggcgtatgcccccgttttagccttgctgcgaattttcgtccagcatcttgagagatatcccacgcgcttatgtcgtagatcccacgaaaacgcgcggcttattccagcgcaatccagcagttttctgccgcaagcctatacttggcccactaccagaagtgattcgggagctcattgatgtttgcgctcatgcacagcacccgccttgaatcgctgcacctgagcgttgatccggtgaccggcttgaaggcgatcatcgccatccacaacagtcgcctgggcccagcgttgggtggctgtcgttacctggcctaccctaatgatgaaaccgccgtggccgatgctgcgcgcctggcgcaaggcatgagctacaaagccgcactggccgggctgccggtgggcggcggcacggcggtgatcatccgccccgtacacgtggaaagccgtgcggcgctgttcgaggcgtttggccgttgtgtggaaaaactcgacggccgcttcatcacctcgatcgacagcggcacctcggtcgccgacatggactgcatcgcccagaacacccgctttgtcaccagcaccaccgccgccggcgaccctgcgccccatgccgccatgggagtgttcgccggtatccgcaccaccgccatggcgcgcttgggcagcgacaacctcgagggcctgcgcgtcgcggtccagggcctgggcaatgtcggttacgccctggccgaacaactgcatgccgccggtgccgaactgctggtcagcgacatcgaccacggcaaggtgcaactggccatggagcaactgggcgcccacccgattgccaacgacgccttgctcagcacgccctgcgacatcctcgcaccgtgcggcgtcggcgccgtattcaaccgtaacagtgtcggccagttgcgttgcgccgccgtggcgggttcggccagcgcacaactgaccaacctggacatcgccgaccaattggaaggccgcggcatcctctacgcaccggactatgtgatcaactctggcgggctgatctacgtcgccctcaaacacgccggcaccgacctgcccggcatcaccgcgcacctgtcgaacatcggcagccgcctgaccgaaatcttcgcccacgcccaagccgaaaaacgctcccccgcacgggtggccgatgagctagccgaacgcctgctgtacaaataggccaggcattaaaaaggccctgaatccatgattcagggcctgttcaattcgggctttactccgccgccgggttcagcaactcggacaatgcgtccggttggctcttgaacgccttggcaaacacatcgcggttcttcgccatgtagatcccggcttcttccacctgctgctcgctcaacgacggcacggctttttgcaacacctctgccagcaactcagcgagttcaagcatcttgtcatgacggtcagcttcggctttatccatgaacaaacgctccagatctcggctgctgcggtataccacttcgacggccattcaccacctcacatgccttcacgatagttgtcttttgcgactactgtatttatatacagctaaaaggataagccaaacgtcggggtttggatagtaggtttttaatgtagttgggaaattgggggctgaaccggaaatttcgcacagcacgctgaggttctcgatcgttcccacgctctgcgggggaatgcatcccgtgacgctccgcgtcacccacgagcaggtctgagggacgcggagcgtcccaggcggcgttcccacgcggagcgtgggaacgatcggggggaattaagtgcctcgtatcatacggccaccatcttattctccagccctggccttttttctgcatgcagaacaaccgtcacgtccaccccgcattatccggtcgagccgacctaaggaagcatcatcgtgaaaatcaactgggccgaaaggctgcgtcagcaagtacatgggctggccgagtcgctgggtaatctgtttgtcgagtcgttccattacctggcgctgttcgccattggtgcggtgaccgcctgggcggcggtgatggaattcctggggatgctggagaacgggcacatcaagatcgatgacatcttgctgctgttcatctacctggaattgggtgccatggtcgggatttacttcaagaccaaccacatgccggtgcgcttcctgatctacgtggcgatcactgcgctcacgcgtttgctgatctccaacgtgtcgcaccacaacccgccggacgtgggcatcatctacctgtgcggcggcattttgctgttggcattcgcgatcctggtagtgcgctacgcgtcgtcggccttcccttcggtgaaggtcgaaagcccgcgtcgcaagggcgaggcgagcctggagacagagaagggcgagctttaaagccccacgctgaagggcagggtacgggcgggcgggcgctgcaggagtttgtggctgtcgccgtccgtcatcagctccaggatttgcacggcgctgtggccctgttcgatggcgatgccgaactggatgctttgcaccaggcgtttgaggcgttgcgggtcgttgcgctgttcggcgctgatcatgcgctttgccactacgccggtctcgttcgagagggtgagcatgatgctgccgtccagccgttggatgctcaggttgacgcggtattgggggctgaacgtgtcggtgatgatctgaaaaggattgtccatggtgcgttaccgcctgataagaacatgcagtcattgacggccggtgtcgggattagttcgcattgcctgaccactggccaaattccgttttcctcgaaagttctacagcaagggccgtgccgtacagcgatttacccggcacagaaatccaaatgtgggagcgggcttgctcgcgaatacggtgtatcagccaacaaatacttggctgaaggaccgcattcgcgagcaagcccgctcccacattttttgtgctgcttttggagatcagtgagctaattcagggcatcacggaaaaaacgatcgcagacagcgcaatcagcccgatgaccaccacaaacacattcgatgcctggcctgaatactggcgcaaagatggcactcggcggatggcgtacattggcatcaggaacagcaggcacgcgatgatcggcccgcccatggtttcgatcatgcccaggatgctcgggttgaaggtggccacggcccagcaggtcagtaccatgaacaacgcggtgcagcgttccagccatttcgccgacatcgaacggttgcgcccacgcagggatttgacgatcaggccctggaagccttcgctggcgccgatgtagtggcccaggaaggatttggtgatcgccaccagcgcgatcaacggcgcggcgtaggcaatcaccggcgtctggaagtggttggccaggtacgacaggatcgagatgttctgcgccttggccgcggccaggtcagccggtgacagcgccagcacgcagctgaagcagaagaacatcaccgtcagcaccatcatgccgtgggcggtggccaggatgccgctgcttttgcgctcggcctgggcgccgtagacgcgcttctggtccacggcaaaggcggagatgatcggcgaatggttgaacgagaacaccatcaccgggatggccagccacaatgtcttgaagaacagcggcaacggcatgccttcgctggcggaggcgaagaacgcgccattccagttgggaatcaggctgaatgccagcagcagcaaggcggccacgaaggggtacaccagcacgctcatggccttgacgattacgccctggccgcaacgcacgatggccatcaggccgaggatcagcaccagcgacagaatcgcccggggtggcggcgccatgtgcaattggtgctccatgaaactgcccagggtgttggtcagcgccacgctgtacaccagcagaatcgggaagatcgcaaagaaatacagcagggtgatcagcttgccggcgccgacaccaaagtgttcctcgaccacttcggtgatgtcgccggatttgcccgacagcacgaagcgcgtcaacccacggtgggcgaagaaggtcatcggaaacgccagcagcgccagcacgatcagcggccagaaaccgccgacaccggcgttgatcggcaggaacagggtgcccgcgccgatggcggtgccgtagaggccgagcatccaggtggtgtcgtgtttggtccagccggtggttactgtgctttctctgacatcgggattttcggcagcaggtgtacgtacatcagtcatcggtattgcctcgttattatttttgcgcgggctcacgttggggcgggtagcagtgctccgatcagcactccacccagctgaccgccaggccgccccgtgaagtttctttgtatttgtcatgcatatcggcgccggtatcgcgcatggtgcggatgacccggtcgagggagatgaagtgtttgccgtcgccgcgcagggccatctgcgtggcgttgatcgccttgaccgccgcaatggcattgcgctcgatgcacggcacctgcaccaggccaccgaccgggtcgcaggtcaggccgaggttgtgttccaggccgatttcggcggcgttttccaattgctccggggtggcaccgaggatatcggccaggccggcagcagccatggcgcaggccgaacccacttcgccctggcagccgacttcggcgccggaaatggaggcgtttttcttgcagaggatgccgacggcggcggcggccaggaagaaattgaccacgtcgtcgtcagacgcgtcggcgttgaacttcatgtagtagtgcagcacggcggggatgataccggccgcgccattggtcggcgcggtgaccatgcgcccgccggcggcgttttcttcgttgacggcgagggcgaacaggttgacccattccatcgccgacaaggtcgaggtgatcacgttgggcttgccgatttccaacaggctgcggtgcaatttcgcggcgcgacgcggcacatccaggccgccgggcaggatgccttcatcgcgcaggccctgttccacgcattcgcgcatcaccgaccagatatgcagcaggccgctgcggatctcttcgtcgctgcgccacgcccgctcattggccatcatcagctcggatacccgcaggccgtgcttgttgcacaaggccagcagttctacagcgctggaaaagtcatagggcaattgcacatcgctgctgggcgcaacgcctgatgcggcttcggcggcttcgatgatgaaaccaccgcccaccgagtaataggtttgttcgctcagcagcccgctgtcgccataggcgtgcagggacatggcgttggggtgatagggcaggctttcgtccagcagcaacagatcggtgtgccagttgaaagcgattgcctgggagcctgccaacatcaattggccggactcgcgcaattgctggatacgcgcattgatcgaggtggggtcgacgcggtctggccattcgcccatcaggcccatgacacaggcgcggtcggtggcatggccgacgccggtagcggacagcgagccatacaggcgtacttcgacgcgacgggtttggctgagcacatgctggtcggtcagggcttgggcgaacgtcgcggcagcgcgcatcgggccgacagtatgggagctggaagggccgatgcccaccttgaatagatcgaaaacactgatagccatgctaaagccttacaagcaatggagtagaaatcgctgccatgttttgtagagcaggcggaattggcgcgatactgagcctatggctcggcactgaccaacgaattatcctaagacaccctttagcaggactaaacgctatgactcgccccctccacggccagacctatgtctggttgcatgtgttttcctgcgccgcacggcatctgtcgttcacccgctgcgccgaagaactgcacatcacgccgggagcggtgagccagcaaattcgccaactggaggagcgcctgggctttcggctgtttcatcggcgcgcgcggggggtagaactcagcgccgaggggcagcgcctggcggccgtggtgggtgaggcctacggcagcattgatgccgaattgcagcgcctggacgccgggatgatcagcggcaccttgcgcctgcgttcgatcccctcgtttcttggcaagtggctgaccccgcgtctaccgcgctttcagcagcgttttccggatattcaactgcgcatggtcgccgaagacagcagcatcgccctgcatgaaggcgacttcgacttggccatcgacctcaacgacggcagctacccagggttgttatccacagccctgttggatgaacagatattcccggtgtgcgcccccagcctgttgcgtggccgcccgcctttgcatggcccggcggacctggcgcatttcccgctgctgcacgacatcaccgcctggcgtgggagttatgaatatgccgagtgggagttttacctcaatgccatcggctatcacggtgccgacgtacggcgcgggcacaccttcaaccgcaaccacctgaccatcgaagccgccatcgccggcatgggcgtggcgattgcccggcgcaccttgctgaacgatgaactggagcgcggcaccttgatcgtgccgttcggcctggcggtgcccaaccataaacgctacgtgctgctgtatgcgccgggcgcgttgaaccatccgggcgtgcgtgcggtgcatgattggctggtggaggaagcagggatttttcgcggattgcacccgttgggagaggggcaattgtgagtttcgcagggcgtaagaagatgtaactaactccccaccctaacagcgtttttgctcgtcgtcagggttaatttgtaatgtaggatttatctttgcaaaggacttgaattgtttcagcaggtgctcaattgtgtaatcaagaggtcatggtttcaccaccccggtgttgcagtttgtgacctctggcgagctagctgaaataagggaagaactatgcaaatccaagtcaatagcgataaccatattgaaagcagcatccgactggaggagtgggtacgtactaccattgagagcacgctcgaacgctacgaagaagacctgacccgtgtggaggtctacctgcgggacgagaacggtgacaagcccggtccccacgacctgagttgccgtctggaagcacggccaaagggccatcaaccagtttccgtgtgccataaagccgataccctggaacaggcgatcgatggcgccgcagtcaagctcgaccacgcactggaacatctgtttggcaaactgcaaggcaagccgcgcgctgccggtaaaaaccagccaatcaacaaagtgaatgaagacgcgttggaagaggaattcctggaaaacgagaacgctgccattaacggctgattgttttttcattcccccactgaaaacgggcctgcacatgcaggcccgtttttcgttcagcgctcgcgccggaagaaataccggctcagcatcgccagcccgcaggcgcccaaccccgcaaacagcatggcccagccggcgccgctgcgcagcgctgtttgcgcatcctgaatggtcagccccggcgcatccaacttgccggcggcaatatgctggctgaggtttgcccactccagtgccgtgctgtgaggcagcacgtgggccaggttgtggctgatccccaacaacagcacaaggcccatcagcgcgatattgagcgcgagggtgatcagccgtgcgctgaagtcgatgcccgaggccatgcccgcgcggtcagccgagactgagccggtggtggtgttggtggtcggcgaattggtcagcgccagcccgataccggcgatcacgcaactgagcagcaccagcgccgtgctgggttgttgggcgtaattaacggcggccatccccatgaaccctgcgcccattgtccccaggcccaggggaatgatgcgttcggcgccaaaacgcagggccaggcgttcggccagcggcggcaccagcaaagtgggcaaggtgtacgcgagcaatgcggcgccggtggtcacggtgtcgtaacccaggcccgcttggaagtacaacggcaggtaaatcatgaacggccagaagctgaagttcatgccgatcgagcccatcaacgcgccattgaagcgttggatgcggaacaccgagaagtcgaacattgggtgggcactgcgccgctcaatccagataaacagcagcagcccgaagaccgacaggccggcccagccgagcatcgccggggtaccaaagccgatttcgctgccctgggtgatgaaatagaccagcgcaaacaccgtgagtgtcatggtcagcatgccggcgatgtcgaggcgatggctggccgggtcgcgggattcctgcacgctgatgtgcaacaacgccaaggtgaacagggtcagcggtacgtgcactaggaacacccagcgccagtccgccacggccaggatcaaggcccccaccatcggcccgaaacccagacccacgccagcgatcacgccccatatcgcgaaggcccgcgcacgcgtcgcgggttcgcggaattggtgggacaagatcgcgaactggcaaatcatcattgctccggcgccgataccttgaacaaaccgcgccatgatcagcgtggcggcgctgtcggccagcccacaggccaatgaagctagcccgaacagccataggcacaccaccaatacgcgccgacgaccaaagcgatccgccaaggtgcccgccgccatgagtacgctggtacaggccagggtgtaggcattcatgatccattgggcgtcttgaaagcccgtgcccagttgttgttcgagcgtgggcaggatgaccggcacgctggagatttccaggccgaacatcagggccaccaggcagacggctgtgagggccaggccgttcctggcggtacgcgggggcgtgagggctgagagtgcggcggcgcggggcatacgacattcctttcgagagcgggaggggctattctctcgggaacaaggttctttattggcgacaacttttccatcgataagggaacaaagggcgacaattaagcatggctactcctcgttttgatggtgttgaactctttctgcaggttgtcgaaagcggcaacctcaccgaagccgccgaacgcctgaacctcacccgctcggcggtaggcaagggcctggcgcgcctggaagcgcgcttgggcacgtgcctgttacagcgttccacccggcgccagcggttgaccgaggacgggcaggcgtactacgagcattgcctgcgcgcattggcagagttggaggcggccgagtcggtgctggaaagcggccgtcagcaaccccgcgggcgtttgcgagtgagcgtacccctggcgtttggtcatcactatgccgcgccagcgttgtgggccctgatggacagctatccggaactggaaatcgacctttgtttttccgaccgcatgatcgacttggtgcaggaaggcttcgatatcgctgtgcgcatcggcccgttgcccgacaccgaccgcctgagtgcaaggcgcctggggcagcaggtcatggggctggcggcgtcaccggcgtatttgcagcgcaagggcgccattgaaagtatcgaagacctggccgctcatcgtggtatcgcctaccgcagcaacaccgcgcagcgctcgcgcctggtctctcccctgatcctggacgacctccaggccgtagccgatgccgccatcgcgggcgtgggcctggcctggttgccgagttggttgattgcccattacgcactgcgcgggcagttgcaggccgtgctgcccagctatcgtgagcaacctgcaccgatccatgtgatctggccgacggcggcgcatatgccggccaagacgcggtgtgccattgacgcgttggtggccgccacccccagttgcctggcgggcagttagatcctgaacacactgaaaatcatctgtaggagcgagcttgctcgcgaaaaacgtcaacgataacgcgtgtttgctgaatgaacgcggcgccnnnnnnnnnnnnnnnnnnnnnnnnnnnnnnnnnnnnnnnnttgctgaatgaacgcggcgcctgtgagtttttcgcgagcaagctcgctcctacaaaatgcggtcagaacgcgatagaggtttgcacatacaccgtgcgcggctcacccacgtacttgcccttgttgttgtcatcaaacgagcgggtgtagtactgcttgttgaagatgtttttcacccccaccgccacattcaagtccgacaactgcggtccgaagtcataggctgcgcggctgctgaacagcatgtagccgggaatacggccattggcgccgtcggcgctttcggcttgggtgttggcgttgtcggcgaactggctgctctggtagctgctgtccacattcagcttccatgggccttcggtgtaacccacgccgagggtacctttgtgcttggaggagaaaggcacgcggttgcctttgttcgggccgtcttcgcggatggtcgcatccacataggcgtaggtggcgtacacgtcaaaccctgccagcgccgggctcaggccgtcgagggcgtagttgatgctcgactcgatgccctggtggcgggtttcaccgcgggcgatcacggtgtcgttggtctggttgctgtcgtactggttgtcgaagttgatcaggaaggcaccgatttccgcacgcaggttgccgttgtcatagcgcgtgccgagttcccaggtgcgggctttttccggtttcacttcgccgctgttcacacggttgggcatctggctgtattgcacgctgccgaacgagccttcggtgttggcgtacaggttccagtcgtcggtgaggtggtagagcacgttcagcgcgggcagcgcggtgttgtagtcacccttgtatttgacgttgctcaggttgttggtctgctgggacttgatcatctcgtagcgaatgcctggggtgatggtccacttgccgatgtcgatgcggtcgtcgatgaagaacgcattggcttcggtgccgccgcgcgtgtcgcggtcgttgcggctgttggtggtggggatttgctggttggcggcaatcggtgtgcggtagcgcagttcgtggccggcttcattgatgtagcggtagcccacacccacttcgtggctggtggggccgaggtcgaagccctgggcgaagcgcgtttccaggccgcgtacccaatattcccgtggcgacagcgacaggaaactgccctggtccaggtaaccgctgcgcagggtctttgtgaagaaactgttgatcgtgaattcgcggcggtcctgctcgtagcggtagccgacgttgaacatcgtgcggcggccccagaacttgtcgtagggccgagtggactgatacgggtcggccttgtagtccttgacgttcaaaccgcccggcatgtcggcctggccttcgtagtactgcgccatggcgttgaagctgttggcgtcgtccagttggtatttgcccttgaggatcaggtcgtcgatgcgcgtgttgctgttttcgcgccaatcgccgccgcgggtgccggagtacaagagcgcgccgcccaggccattgtcggcggtgccgcccgccagcaggttgccggtggtcttgaagccgtcgtggctggaggaggggctggtctcggtctgcaaaccgcccttgaccgtcggcgcatccgggatggcacgggtgacgaagttgacgatgccaccgacgttttgcgggccgtagcgcaccgcaccgccgccgcgtaccacatccaccgcgtccatattgcccatgctgatcggcgcgaaggagagttgcggctggccgtaaggcgcgaagggcaccgggatgccatccatcagcacggtggagcgcgacgccaggcgcgggttgagcccgcgaataccgaagttcagcgccatgtcgtggctaccggtgccgttgttgtccggggcgttgacgccagggatgcggttaagcacatcgcgggcctgggtggcgccctggcgttcgaattcttcacggcggatcacatctcgggcgccggggtgttcgaacacgttggtttgcgccgcgtcaccgagccagtcgccgaccacgttggaggtctgcaactccagggtagcgggggcgcccgctggttgcaggctgtaggcgttatcaccctctgcgcgggcttgcaggccggtgccttccagtagtttttgcaagccctcggcagcgctgtaattgcccgacagccctgggctttgcataccggccgtcactgccgaaccgaaggacaccagcacgccggcttcgcgaccgaattgattcagggccgcttccagggtggtcggcgcgatgtggtacgccttggcgtcggctgccatcaccgccggcagtgcggtcaggctgaggctggcaccgagcaggagttggcgcagggtacgggcgagaagcgtcggttgctggggcatgaagggcggtcctgagaaggaaggatcaagggggggctttccttctctgtcacgccaggtgcggaaaacggctcacaattgcgtataaatatttttgaatgcgcttcccactgtaggagcgagcttgctcgcgaaagtcgtcaacgataatgcgggttgtctggtttaacgcggtgggttgaggtttttcgcgagcaagctcgctcctacaaaaagcgcttgcatcacgcacgtgcctgcacggtcacccaataacgcgtaaaacgccgcactttcaccggcaggctgatttccagcaggtcgaggatgcgttcgctgtcgtccagcgggtagctgccggacagcagcaggttggccacttgtggatcgcaatggagctggccgcgacgatagcgccccagttcactcaagaagtcttccaggcgcatatgtgcggccaccagcatgccgtcggcccaggcgccgctgttggcgtcggtggcgcgcggggtgtcccagcctttgcgggtgaaattgacctggtgcgcggcatcaacgctcagcgccaagccgttgtagcggttgggcatcacctcgacctggccggccagcaccgccagttgggtgtggtcgttgaactggcgcacagtcaagcgcgccgcctggctgctgagcaggccctggccggtcagcacgtgcaacggcgcctggcctgcacgggcagtgagcaggatttcaccttcaagcaggcgcaccaggcgctgctggccgtcgaaatgcacatccacagcgctgccggtgttgagctgcaactggctgccgtcggccagttgcaccgtgcggcgttggcccaccgggctgcgatagtcagccgtcagcggcggcaggatatgttgctggcgcaggctccaggcagcggctgaaccggcacccagaatcagcagcaacttaagcgcctggcgccggttgctggaggtgggggcattcaacgcggcgtgagccaggggcgagggcacgccgcgcaggcgttggttgacgcgctggatctgctcccacgcgcgttggtgttcgatgtgagcattcaaccattgctgccaggccgcctgctggcgtgggttgagcgcgccttgctgcatttccagcaaccagtgcacggcttgttcggcgacttggctggagacgttcatagggcgaagtagcagcgcatggccgctttggtcaggtggcgtttgacggtggcgatggagatgcccagttgcgcgccgatttgcgcgtaggtcaggccgtcgagttgggccagcaggaaagcgcgtttgacctgcttgggcaagccgtcgagcagttggtccagttccagcagggtttgcaggatgattgcgcggtcttcttccgacggtgccacgtgttcgggcatctgcgccaaggcctcgaggtaggcgcgctccaggtcctggcggcggtagaagttgaacagcacgcgcttggccacggtggtgaggaaggcgcgcggctcgatcagcgttggcgcttcccgggcactgagcacgcggatgaaggtgtcctgcgccaggtcggccgcgttgtccgggcagccgagcttgcgccgcaaccagccggtaagccagtggtgatggtcgttgtacaacacttcgacgggattggacggctgcaacgcgatcactccgcaagcattcgacatgctttagagaacaagaattgttcgcattgtagggcccgtgaccgggttcggcaatcgggcagggcaggtgattcatccgttctcttttgcttatgagaatatttatcattaatattgcgcgctgatgaaccaggcgcctgccgcatgaaaagcaaaacctcattgcccgtttcctaccgccttgccgtcacctcgcgcgtgctggcggcggtgattggtggttacctgatggcctccctggccgccatttgcctggcgctgtggctgcccactacccgtgccgatgcggtggttaccggcatgatgagttcctttgtgttctacctgctggcggtgctctggtgttttgcctgccgcacggcatggcgcgcctgggcaggggtgatggtgccgagtgcgctgtttgccaccctggccggcattggtttctggatggctcgcacatgaaagagggctttcgccaggccatggcctggttgcacacctgggcaggcttgatcttcggttggctgctgttcgcgattttcctgaccggcaccctggcctatttcaaagatgaaataacccactggatgcagcccgaagtgcaggcccatcccctggacgatgggcgcagcctcgccgtcgcgcaaagctacctgcaacagcaggcgcccaccgccgcgcgctggttcattaccttgccgacccgccgcgaccccggcttgtcggtgatgtggcaggacaagctcgagcccggcaagcgcggcaccttcatccagaaagtcctcgaccccgtcaccggccaagcggtgcaggcccgcgaaagcaagggcggcgagttcttctatcgtttccacttccagctgcaaatgccttacccgtggggccgctggctgtcgaccatcgccgccatggtgatgttcgtcgcgctgatcaccggcatcatcacccacaagaaaatcttcaaggacttcttcaccttccgcccccgcaaaggccagcgctcctggctggacgggcacaacgcggtgggtgtgctggtgctgccgtttcacctgatgatcacctacagcagcctggtgattttcatgagcatggtcatgcccgcgcccatcgtggcgtcctatggcgacgacagccgggcgtttttcaatgagctgtttcccaacaccaacaatgcgccggcccttggccagccagggcagttgctgccgttattgccgctgtaccagcaggcgcgggagcagtgggcgggtggtcatgtagggcgggtggcggtcaacaaccccggcgatgccaacgcctcggtcaatgtgttccgcgccggctccgacagcgtagtgcatgcctccggcagtaccctgtcgttcaacggcaccaccggcgagctgttgcgaggcagtgccgagccgtcattggcgacggccatcggtggcagtttctacggtttgcacatgggccatttcgccggcccagtgctgcgctggctgtactttatttgcggcctggcgggcacggcgatgatcggtacgggcttggtgatctggctgggcaagcgccagctcaaacatgccaaagcctcggtcatgccgtttgaactgcgcctggtggaggtgttgaatatcgccagcatgtccggattgatgatcgccatcgcggcgtttttctgggccaaccgcctgttgccggtaagcttcgctgcgcgttccgactgggaagtgcaggcgttctttatcgcctggagcctgagcctgttgcacgccttgctgcggcgcggtcgccagggttgggtcgagcaactgagcttcggcgcgctgttgtttgccgccattccattgcttaacgccatcaccaccgcgcaccacttgggcgtctccgtgccaaacggcgactgggccatggccggcttcgacctcacctgcctggccagcggcatgttcctggcctgggcggcgtggaagatgcaccaccgcaccgcgccgcaacccaaggctgagcgtgcccgcgggttgacactcaagcagcaggcccactgatgctcctcgcgctattgatgtgctacgccgggtttaccgcgctgtgtttgtctaccgaccgtcaccacggcgaattgctgcactgcaaacccacgcccacgcggcgcctggcgctgcgggtgggcggctggttgctgctggccgtgtcgatctggccggccgtgcttggtgctggttggggccagggcctagtggagtggtgcgcggtgttgatgctcagcgccttgctgctggtgttgctgctgccgtatcggccaaggctggccttgatcctggcgggcctcggcctgttggccagccctgttgcggcgttcgccctatcttgagtcggccatgaggatcaacccaccgccgcaaccccaggacaatccgcatgcggaggcggccggtgggcgcgcgcattttttgcaggtgtttttgtcccagcgttcgcaaatggaggcgttggtcagccgtcgcgtcgggtgccgcgccacggcagccgacctggtgcaggatttgttcctgcgcttttggcgtcgcccgctggtgcaggttgaagagctgagcacctacctgctgcgttgcgccggcaatatcgccatcgaccacctgcgcagcgaaggcgcacgggcgcgcagcagtgaaggctggctacccgagcagtcagacaatcaaggctgcgaaccccaggcggcgctggaggcgggcaatgatctgcgccatgtggaagccgccttgcgcagcttgcccgaacgcacccgccagattttcctgcttaaccgcattcacggccgcaaatacgcagaaatcgccaaagccatgggcctgtcccaaagcgccgtggaaaaacatatgatgcgcgccctcgaagcctgcaaggccagccttcgcgaaccatcgccgccacgcacgccagggaaagccccgtgaacgtcacgcccacgcccgcccaggaacaggccgcgctcgattggctgagcctgctgcatgaccagcccagcagcggcgaccaggccacgttcagccgctggttacgcgcagatcccgcacacgtcgaggcctattcccaagcccaggtgctctgggaattgagcgaagtgccggcgcgccaactggccgacgaggacgcgctcgccttgcagggctacctcaataggatcaccgcctccaaacgctcccgggtggcgcgttggtctggtgccttggccgtcgctgcctgcctgctgctgatggtgtcgatgggcgccggttggcagccgtcgcgctgggtcgatgaatggggcgccgattatgtgacggcgccgggggaggtgcagactttcaccctggccgatcaatccaaggtcaccctagacgccgacagcgccatcgccgtggatttcagccagggcgaacggcacatccaattgcgccgtggtgcaggttttttcagtgtgacccacaccggccaacccttcgtggtggaggcgagcggcggtgaagcgcgggtaatgggaacgcagtttgaagtgcgcctgcaacctgacggcgccgaggtcactgtgctgtccggccgtgtgggcgtgacgccctccaaacagggccagcaacaggtgctgacagcgggccagcaagtggcctatgccgacggtattgccgaccctttgcatggggtcgacagcgcctcacgcctggcttggcgcgaaggttggctcaactactacagggcacccctggccgatgtggtccaggacctgaggcgttattaccccggccgaattcttctgcttaacgaaaacatggccgccaaacgcgtcagcggcagctttccgagccaggaccctgtagcggtcttgaacgccttgcaagcggtgttgggctttgaacagcacaccttgttgggccgaatgattgtgttgcgctaggcccgcagcgccttcatcgaaccttcatcgcaatcgccacaacctgtcaccaaacggttacacgtgccgtggatcatccctgggttcctgaacaagtggtcaggaagctcgcatctgccccatacaacacaacaatgtcagtaagggatctacacgtgaaccacaacactctttatgccctgctcctcgcatcgggcctgggcggctttgcgccgctggttttggccgatgatgcccaggatgtaggctcggtgaacatcgccggcaagcaaacccttggcagcggtcacatgattctcgaagaaagtgcgaaggcacgctcgacggtgaccaagcaagccatggacgaaatgtcggccaccgccaacgccatcgacaagctcaagtacacgccgggcatcaacgtttccagtgatgacgccagcggcaccagtggcaccagttttaccatgcggggcatgagttccgaccaggtcggcgtctcggtggacggcgtgccgatcaacgattcgggcaactacagtgtgtactccaaccagttgggcgacccggaaaacctggccgaagtgttcgccacccaaggttcctccgaggccgacggcccgcacatcggctccagcggcggcaacattggcatgatcaccattcgcccgaccaaggacgccggggttttcgccaaacagatcgtcggtgccaacgccctgcgcaagaccttcgtgcgagcgaacaccggggatgtgggtggcctgaaaacctgggtgtcggcatcccacctggaaggtgacaaatggcgcggcaagggcactctgcgcagcgacaagatcgagtggagcagcctgttcgaaggggataacggcaactccacattggccacgatcaagtacaacaagcaggaaaactacaactacaacagccttagcaaggcgcagttcgacaccgaaggacggcgtaaggattacgcgcaaagcccggtgtacaaggctggtttgctgtcggcgtcctacaagctcaaccgcaacccgttcgaaagcgtcaacgctacgctgacccagcgctggcaactgcaggacaatttgtcgctgacgctcacgccgtattactactgggccaacggtggcagcttcagcggccagacggcttccaacctggggccaaagtccgacaaggccggcaactacgacctgagtaacctgcaatcggccaactattaccgcccttcgtggaccgaaacctggcgccctggcttcacggcgaaaatgaagtgggacatcaacgaagaacacagcctggactatggctactggtacgaacgcgcacgccagcgccagacccagccctttatcggcattaacaacgaaggtgcccccgacgatgtgtggggcgactacaacagcggcggccaggtggtcgacaaaaacggcgctacggtccagggccgtcactactacaccgtcactcccgcgcagaagctctgggtacaggacaactggcaagccacaccggacctgagttttgttggcggcgtggcctaccaatatgtcgagcgtgacggcaacaacctcggcagcctgtacgacacaccggagaagcgtaacacccgctaccaccagttcctgcccaacttcagcgccaagtaccaggtcgatgaaagcaaccaggcgttctacaacgtcacccgcaatatgcgcacgccgcccaactacgtgctgtacaacaagggcgactccgtcagcctcaagtccgagttgagctggaaccaggaactgggctggcgctacaccgaagacgatatggccttgagtgcgaccctgttctacatcagcttcaaggatcgccaggtctcgaccaccgacgccagcggtgactacatggtgctcaacgtcggcactgtcgataacaaaggcctggagctggaatggagcggcctgttgccgcacaacttcaattactacgcgtcctatacctacacccagtctgagcagaaggacgacctgctcagcaagaacgtgctgctaccaacctcgggcaagcaattggccaacgtgccggaaaacatgttcaacctggtgttcgggtatgacgattcgcggttctacggcaacattgcaggcaaatatgtcggcagtttctatggcgatttgaccaacaaggagaagatcgaaggccgtacggtgtttgacctgaacgcgggtatttatttgccggtggataagaaggtcatcaagtcggcggcactgcggttttcgatgctcaacgtgttcgacaaggagtacttgagctcggcgcgtacggtggcgttcaactcggcgccggtgaacgggttgggggcgagcacggcgtattacaacgtgggtgaggagcgcacggcgatggtgtcgctggaagccaacttctaagcccacccgcaagcccaatgtgcagagctgacttgtgtgggagctggcttgcctgcgatagcggtgtgtcagtcacaggtattgaacctgttacaccgccatcgcaggcaagccagctcccacatttgattgtgtgttacttcaatgcggccatgatcgcttcagggttgtagtcgcgaatcaacgtgccgttcacatccacaaacggaatcccaccaccgcccagcgcctcatacgccttgcgcgcctgggcatccttctcgatatcgacggcctggtacgggatacccttctggtccagaaaacgccggatctgcttgcagtacccacaccattcggtggcatagagcaccacccgcgcagaggcgcgcacctgctccgggaccacctgggacgggttgaacagccgctcgaccttgccccagttctggatcgcaaccaccaccagcaacaccagcaggactttcttgagtaccccgcccagcatcagttacggcgcttgagctggtcggtcagttgggtcggcaggcccttgatgatcaaggtgccggcggcttcgtcgtactcgatcttgtcgcccagcaggtgcgcttcaaagctgatggacaggccctcggcgcgcccggtgaagcggcggaactggttgagggtgcgtttgtcggccggaatttccggcgacaggccgtaatccttgttgcggatgtggtcgtagaaggcttttggccggtcttcatcgatcaggcccgagagctcttccaggcccatgggttcgccgagcttcgcctggctgctggcgtagtccaccagggtcttggttttctcgcgggcggactcgtcgggcaggtcttcgctttcgacgaagtcactgaacgccttgagcagggtgcgggtttcgcccgggccatccacgccttcctggcagccgataaagtcgcggaagtactccgagaccttcttgccgttcttgcctttgatgaaggagatgtactgcttggactgcttgttgttctgccactcggagacgttgatacgcgccgccaggtgcaactggcccaggtccaggtggcgcgagggcgtcacgtccagctcgtcggtcaccgccacgccttcgctgtggtgcagcagggcgatggccaggtagtcggtcatgccttgctggtaatgggcaaacagcacatggccgccggtggagaggttggattcctccatcagcttctgcaggtgctctaccgccgtgcggctgaagctggtgaagtcctggccaccgtcaaagtactccttcaaccaaccgctgaacgggtgcgcgccggactcggcatggaagaaaccccaggccttgccttgtttggcgttgtagctctcgttgaggtcggcaagcatgttctcgatggcggcggactcggccagttccgtgtcgcgggcgtgaagaactgcgggtgtgccgtcgggttttttgtcgatcaggtggacgatgcaatgacggatcggcataggcttctcggctggttgaagggggagcggttggcctccccgaaaagtcgcccagtgtaccgcacccattggtcaagacgtgccccgaacggcattttgcacgccctgtgactggccatatgcctttttttcacggtttagagcgataaagctgaccaaatgggtatgttgaggcggatatttccccgtctctgtgctagttttgccccgtcttacgccaagtctcggcgttaagcgtgcattcagcatttgtcaggtcgaaccaatccccgattcaagcatctataaccccgatctccgtggttatagccggggatgccaggccatgacggtcgggctcgacggctgacactgcactctgcaatccatatgaatttgatagggaaggaacaccacaatggctattactaaagaccaactgatcgctgacctggctgaagcagtagacgcaccgaaaactaccgtgcgtgctctgctggaccaactgagccaagttgttgctgatcagctggaaaatggcggcgaaatcactctgccaggcgttggcaaactgaaagtgaccgagcgtcctgcccgtactggccgtaacccttcgactggcgctgccatcgaaatcgctgccaagaaagttatcaagctggttgtggctaaaggcctgaccgacgctgttaacaagtaagacgcagcaaaaaaaaccgtgcttcggagtgatccgggcacggttttttattgcctgcgattttattgtgtggcgggcttatcgaacccagcgctggcgccagatctgctgctcgttcttggtctggaacgtccaggccacaaagcggctctgcttctgcccctgggacatctccactacctggctttccagcacgccggcttttttcagcgccgtttcgatcgccggcaggttggaggctttggacaccagggtgctgaaccacagcactttatgcgcaaagtgcgcgctttcggcgatcaactgcgtcacaaaccgcgcctcgccgccctcacaccacagttcggccgattgaccaccgaagttgagcaccggcaatttgcgtttcgggtcggccttgcccaaggcgcgccacttgcgctcgctgcctttggtggcttcgtccatggacgcatggaagggcgggttgcacatcgtaaggtcaaagcgttcacccggctccagcaggcccaacagaatttgtttggggttgggttgctggcgcaactggatgaccttgctcaggtcgttggattgcacgatggccttggcggcgctcacggcgatcgggtcgacctccgagccgaggaagttccagcggtactccatatagccaatcagtgggtagacgcagttggcgcccatgccgacgtccagcaccttgacgatcgaaccgcggggaatcttgccctcgttgacgctggccagcaggtcggcgaggaaatgcacatagtcggcacgccccggtaccggcgggcatagatagtccgccgggatatcccaatgctggatgccatagaacgacttcagcaacgcccggttgaacacccgcaccgcatccgggctggcgaagtcgatgctctctttgccgtagggattgatgatcacgaatttggccagttcaggcgtggtcttgatcagcgccgggaagtcgtaacggcccgtgtggcggttgcgtgggtgcagggtggcctctttgcgcggcgcgacgggtttcgccgtggcggcggttttaggcttcttgcgcggtggtttgggcgtagtgggggcggtcatgatgattctggtgttggctcaaagtgataggcattgtcacacattcttgaacacaactcggtcaaatgtgggagctggcttgcctgcgatgcaggcgactgggggtatcaggcagaccgaggtgatgctatcgcaggcaagccagctcccacagggataaggttcagagtcggaaatggtgtcgttttgctggacaaaaaaaagagacccgaaggtctcttttttcacacggcgccagccttacaggctggaaatccgcgcatgttgctctgccagcttgcccaaggcttgttctgcctcggccaacttggcgcgttctttctcgatcacttcagccggcgccttgtcgacgaacgccgcgttggacagcttgccgcccactcgttgcacttcgccttgcagacgcgcaatttccttgtcgaggcgcgcaagttccgcacccttgtcgatcagtccggccattggcaccagcacttccatgtcgcccaccaacgcagtggcggacagcggtgcttcggcgccttcagccaatacggtgatcgactccagcttggccagcttcttgagcagtgcatcgttctcgctgaggcgacgctgatcttcggcactggcgttcttgacgaacacggccaaaggcttgcccggcccgatgttcatctcggcgcggatgttgcgcgtgccgagcatcagggtcttgagccattcgatatcgctttcggcggcctcatcgatgcgcgcttcgttggccaccggccaaggttgcagcatgatggtcttgccttcgataccggccagcggcgccaggcgctgccagatttcttcggtgatgaacggcatgaacgggtgcgccaggcgcaacgccacttccagcacgcgcaccaaggtgcgacgggtgccgcgctggcgctcgaccggcgagttttcgtcccacagcaccggcttggacagttccaggtaccagtcgcaatactggttccagatgaactcatacagggcctgtgcggccaggtcgaaacgaaactggtcgagctggcgggtcacttcggcttcggtgcgctgcagctgcgagatgatccagcgatccgccaggctcaactcataggcttcgccgttctggccgcagtcttcgcctttgtccagcacgtagcgcgccgcattccagatcttgttgcagaagttgcgatagccttcgacgcggcccatgtcgaacttgatgtcgcgaccggtggaggccagcgagcagaaggtgaagcgcagggcgtcggtgccgtagctggcgatgccgccttcgaactcgtcgcgggtctgcttctcgatctttttcgccagtttcggctgcatcaggcccgaggtgcgtttctgcaccagggtttccaggtcgatgccgtcgatgatatccagtgggtccaggacgttgcccttggacttggacatcttctggccctggccgtcgcgtaccaggccgtgtacgtacacggtcttgaacggtacctgcggggtgccgtcttcgttcttcaccaggtgcatggtgagcatgatcatccgggcaacccagaagaaaatgatgtcgaagccggtgaccagcacgtcggtggagtggaatttcttcaggaactcggtctgctgcggccagcccagggtagagaaggtccacaggcccgaactgaaccaggtgtccagtacgtcgttgtcctgttgcagcgcgatgtccgcgccgaggttgtgcttggcgcgcacttcggcttcgtcgcggcctacatagaccttgcccgattcgtcgtaccaggccggaatgcggtggccccaccacagctgacggctgatgcaccagtcctggatgtcgcgcatccacgagaagtacatgttttcgtactgtttaggcacgaactggatgcggccatcttccacggcggcaatcgcaggctcggccagcggcttggtggacacgtaccactggtcggtcagccacggctcgatcacggtgccggagcggtcgcccttgggcactttgaggccgtggtcgtcgacgctgaccagcaaaccggcggcgtcgaaggcggcaacgatctgcttgcgcgcttcaaaacggtcgaggccggcatattcggccgggatcttgccgtcgatgctgtcgttgagcgagccgtccaggttgaacacctggcaggccggcaatacggcggcatttttgtcgaagatgttcagcagcggcaggttgtggcgcttgccgacttcatagtcgttgaaatcgtgggccggggtgattttcacgcagccggtgccgaattcagggtcgcaatagtcgtccgcgatgatcgggatacggcggccaaccaacggcagttcgacgaacttgccgatcagcgcctggtagcgctcgtcgttcgggttaacggcgacggcggcatcgccgagcatggtttccggacgggtggtggcaacgatcaggtaatcgttgccctcggcggtcttggcgccatcggccagcggatacttgaggttccacaggaagcctttctcgtcgtggttttccacttcgagatcggaaatcgccgtgtgcaacttggtgtcccagttgaccaggcgcttgccgcggtagatcaggccgtcttcgtgcaggcgtacgaaggcttcttttacggcttcggacaggccgtcgtccatggtgaagcgctcgcggctccagtctacggacgaacccaggcgacggatctgacggctgatattgccgccggactggtccttccattcccagactttctccaggaatttctcgcgacccaggtcgtgacggttctggccggtggcttccagttggcgttccaccagcatctgggtggcgataccggcgtggtcggtgcccggttgccacagggtgtcgcgaccctgcatgcggcggaagcggatcaacgcatccatgatcgcattgttgaagccatggcccatgtgcaggctgccagtgacgttcggtggcggaatcatgatggtgtacgagtcgcccgcaccttgtggggcgaaatagttttcggactcccaggtgttgtaccaggaagtttcgatagcgtggggctggtaggtcttatccatgcgcggcgggaccctagttggcatttattcaggaaagccggcaagtataacgggggataggggcgagggcgaggcgaagacggtttaagaccgatgcagaattaatgtgggagctggcttgcctgcgatggcggtgtctcagtcagcatcttcggcgactgatgcgccgccatcgcaggcaagccagctcccacaaggatgggggggactttcagttctggtattggctgagcaaccgctccatccgcgcatccatccgacgcttgatctcggcttcgatatgcggcgcaaagtcgtcgatcacatcctgcatgatcaattgcgcagcggcgcgcagttcattgtccaggtgcagcaacagcgcgtccggggctttttcggctgctggcgctggttctgcaaccacaggtgccggcgcggcaggcttgccgccgaccatgtcgaacagcagcgggatctgtacctcgccatcggccgtctcggtcagcagcggcggttgcaggttgtcatcacccagcaactgacggatcgactccaggtcatccagcaggtggtcgtcttttttcagcgggtttggagtgtccatcatgtactcaaagtcgttgtagccggtgatcttgcagaggatagccctgttcacggtagaaacggaaactctcccgcgcagcctgacgaatagccgggtcttcgaccaccacttccgccacacgggcgaacgcttgggcaaaggccggtaccttcaggtcgaggttgaccagcaaatcatggtgatcgccgcaattatcccccaaacccagcacaaccaggctttcgggttcggattcggcggggccgtggggcacgaagctctcgcccttgaagcgccacaggcgggcatcgagttcgtcacgttgggcggcatcgctgcagtgcaggtagatgcgatggcccatacgccaggctttttcggtgagtttgcaggcaaagtccaggcgcgcgaggggatcggcgctgggcaatatatagaagtcgacttggggcattggaaatcctggggctgacctgattaccccctgtaggagcgagcttgctcgcgaaaaaccagaggacaccgcgttcatccagaatgaacgcgttatcaaaggcgatcttcgcgagcaagctcgctcctacagaagggccggggccgcttaagctttggcgcgatccagcaggtattgggtcaacaggggcaccggacggccagtggcgcccttgtccttgccgccgctggtccaggcggtgccggcgatgtccaggtgcgcccagttgaagttcttggcaaagcgcgacaggaagcaggccgccgtgatggtgccggctttagggccaccgatgttggcgatgtcggcgaacgggctgtcgagctgttcctggtactcatcgaacagcggcagttgccaggcgcggtcgtcggcggccttgccggcgctgagcagttgctcgatcagttcgtcgttgttgcccagcaggccggaggtgtgggagcccagggccacgatgcaggcaccggtcagagtggcgatgtcgatcacggcctggggcttgaagcgctcggcgtaggtcagggcgtcgcacagcaccaggcggccttcggcgtcggtgttgaggatctccacagtctggccgctcatggtggtgacgatatcgcccgggcgcgcagcaccgccgctcggcatattctcggcacaggccaaaatgcacaccaggttgatcggcagcttgagctcaagcaccgcacgcagggtgccgaacacgctggcggcgccgcccatgtcgtacttcatctcgtccatgccggcacctggcttgaggctgatgccgccggtgtcgaaggtgatgcctttacctaccagggcgtaaggcttctcggacttcttgccgccgttgtattgcatcacgatcaggcgtggcggctggtcgctgccctggcccacggcatagaacgagcccatgcccaggtccttgattttcttctcgtccagcacttcaaccttcaagcccttgaactctttgcccagtgccttggcctgttcgcccaggaatgtcgggtggcagatgttcggcggcaggttgcccaggtcgcgagtgaacgacatgccattagcgatggcctgggcgtgggtgacggcgcgctggacttcagcctgggcagccttgatggtcagcagggtgattttcttcagggcgcggggttcggctttctggctcttgaactggtcgaaaatatagccgccgtccaccagcgactcggccagcaggcgggtcttgccgtagctgtcgcggcccttgaccacgatttcatcgagtgccagcaccgcatcgctgccgcccaggcccttgagggtggtgaggatgccgctgacgatcttgcgaaacggacggtcgcccagttcggcatccttgcccacgcccaccagcaaaacgcgctcggccttaaggttgggcaggctctgcagcagcaggctctggccgactttgccggccaggtcgccgcgcttgagcacggcgctgatagcgccgccgctcagttcatccagttgcttggcggcgacgccgagtgtgcggccttcgccgacagcgaccacgagggtggcggttttcaacgtttcggggctaacgctttttacaaccaattccattttcgggtcccttatcaaggtctgtgagccgcgagcttgtactccggctttaaagctcggcagcgttgtaaaccgccagcgacaaaggccgcagtttgaacctcgccagcggagcctgacaacccttggcgcacgctttgtgcgtgcgcatgagtaagctccgtgacaggcgcggtcaatcacaggataatgcgccatctttttagccggcccgtggtaaacgggtcgactcggtatgcttgcttgtttggccgccttagcctgacaaccctggagtgtctggtttgattgtcttccgttatctgtcccgcgaagtcctgttgaccctgagtgccgtgagtgcggtgttgctggtcatcatcatgagtggtcgtttcgtcaagttcctggcccaagccgccgctggcgccctggatccgggctcactgttcctgatcatgggctaccggatgcccggcatgctccagttgatcctgccgctgggactgttcctcggcatattgctggcctatggccggttgtacctggaaagcgagatgactgtgttgtcggccaccggcatgagccagcagcgcctgctggccatgaccatggtgcctgccgccggtgttgccctggtggtggcctggttgagcatgagcctggcgccccagggggccatgcaattccagttgctgctgaacaagcaggatgcgatgactgagttcgacaccctcgagcccggtcgcttccaggcgctcagcgacggttcgcgggtgacctacaccgaaaccatgaccgacgaccgctccaacctcggcggcgtgttcatttcccagaagaacctcggccagaaccagaaagaccgtggcattaccattctggtggccgacagcggacgccaggaaatccgccccgatggcaaccgctacctgatcctggaaaacggctaccgctacgacggcagccctggcctggcggactatcgcgccatcaagtacgacacctatggcgtcatgctgcccaaggccgagatcagtgacgaggtgaccgaccgcgacgcgctgcccacctcatcgctcttcggcagcccggaattgcgctccatcgccgagctgcaatggcgcctttccctgccgttgctggtatttatcgtgaccctgatggccgtgccgctgtcgcgcgtcaacccgcgccaggggcgcttcctcaagttgctgccggcgatcctgctgtacatggcctacctgaccatcctgatttccgcccgtggttccctggagaagggcaagttgccgccggccctgggcctgtggtgggtacacggggttttcctgatgatcggcctggggctgctctattgggaacctatccgtttgaaaatgaagagccgtcgtggcctgaaggagttggctcgtggctaagcttgatcgctacatcggcattagcgtactgatcgccatcctggcggtattgggcatcattctcggcctggccttgctgttcgccttcattgatgaagtgggcaacgtcaccgatacctacacggtcacggacgtgctgagctacgtggcactgaccgcgccgcgtcgcctctacgacatgatgccaatggccgcgctgattggctgcctgatcggcctgggcaccctggccagcaacagcgaactgaccatcatgcgcgccgccggggtttccatcggccgtatcgtctgggcggtcatgaagccgatgctgctgctgatggcgtgcagcgtgctgatcggtgaatacgtcgcgccaccggccgaagccaccgcccaggccaatcgcgccctggcccagggttcgggcgatgcgcaaagcgccaagcacggcctgtggcaccgccagggtgatgagttcatccacatcaacgccgtgcagccgggtggcctgttgatcggggtaacccgctacaccttcgacaaagaacggcacatgttgtcgtccagcttcgccaagcgcgcgcagtacagtggcgaacaatggcaactgagcgacgtcaccaccacgcacttccgtaacgtgggccagggcacccagtccagcaccgaagtggtcaatgtgccgactgagcagtgggatatcgccctgaagccggaattgctcaacaccgtggtgatggtaccggaagcgctgcctatctccggtttatggagctatatccactatctcaaggagcagggtttgaacaatggccgctactggctggcgttctgggtgaaagtcttgcaaccggtggttaccgctgcgttggtgttgatggcgatctccttcattttcgggccgttgcgttccgtgaccctgggccagcgggtatttaccggtgtgctggtgggtttcaccttccgcatcgcccaggacttgctggggccgtcgagcctggtattcggtttttcgccgctgtttgcggtactggtgccaacagctatttgtgctgtggccgggttctggctgctgcgtcgggccggttgaagccgcttgcataatgcccctccctgtaggagcgagcttgctcgcgaaaatctacgaaacgccgcgtttatccaggataagcgcgttatcgttggcgattttcgcgagcaagctcgctcctacagtaataagccccgtggaaacggggcttttttgtattggtcagcaaagatgacgtctggcctgagcatcaggtacaattcccggctatttttcagcgggcaatctgcctgcagcctttttgagtgttgatccgtgagtgatttgagtcatatccgcaatttctccatcatcgcccacattgaccatggcaagtcgacgctggccgatcgatttatccagatgtgcggcggccttgccgagcgtgaaatggaagcccaggtactggattccatggacctcgaacgcgagcgcgggatcaccatcaaggcccacagcgtcacgctgtactacaaggccaaagacggcatcacttaccaactgaacttcattgacaccccaggccacgttgacttcacctacgaagtcagccgttcgctggcggcctgtgaaggtgcgttgctggtggtcgatgccggccagggcgtcgaggcgcagtcggttgccaactgctacaccgcgatcgagcagggcctggaagtcatgcccgtgctcaacaagatcgacctgccccaggccgagcctgagcgcgtcaaggaagagatcgagaagatcatcggcatcgacgctaccgacgccgtcacctgcagcgccaagaccggcctgggtgtcgacgaagtgctcgaacgcctggtgcacaccattcccgcgccgaccggcaactacgaagatccgctgcaagcgttgatcatcgactcctggttcgacaactacctgggcgttgtttccctggtacgcgtgcgccatggccgtgtgaagaagggcgacaagatcctggtcaagtccaccggcaagatccacctggtggacagcgtcggtgtattcaaccccaagcacactgccaccgttgatctgaaagccggtgaagtaggcttcatcatcgccggtatcaaggacattcacggtgcgccagtgggtgataccctgaccctgagctccacgccagacgtcgacgtgctgcccggcttcaagcgcatccagccacaggtctacgccggcctgttcccggtcagctccgatgacttcgaagatttccgcgaagccctgcaaaaactgaccctcaacgactcgtcgttgcagtacaccccggaaagctccgacgccctgggcttcggtttccgttgcgggttcctgggcatgctgcacatggagatcatccaggagcgccttgagcgcgaatacgacctggacctgatcaccaccgcacccaccgttattttcgagttgctgctcaaaaccggtgaaacgatttacgtcgacaacccctccaagctcccggacctgtcggccattgaagacatgcgcgagccgatcgtgcgggccaatatcctggtaccgcaggaacacttgggcaacgtcattaccctgtgcatcgaaaagcgtggcgtgcagcgcgacatgctgtttctcggtacccaggtacaagtgacctacgatatgccgatgaacgaagtggtcctggacttcttcgaccgtctcaagtccaccagtcgcggctatgcttcgctggactaccatttcgatcgttaccaatcggctaatctggtgaaactggatgtgctgatcaacggcgacaaggtagatgccctggcactgatcgtgcacaaggacaacgcgcactacaaaggtcgccaactgaccgagaagatgaaagaactgattccgcgccagatgttcgacgtcgcgatccaggccgccattggcgggcagatcattgcacggacctccgtcaaggctctcagaaagaacgtactggccaaatgctacggcggtgacgtaagccgtaagcgcaagctgcttgagaagcaaaaggccggtaaaaaacgcatgaagcaagtaggcaacgtggaagttccacaagaagccttccttgcggtgctcaggttggatagttaggtcctatgtcactaaatttcccgctgttgctggtcattgccgttgccgtctgtggtctcctggcgttgctcgatctggtgttcttcgccccgcgacgtcgggcggccatcgcttcctatcagggcagcgtcagccagcccgatgcggtggtggtcgaaaagctgaacaaagagcccttgctggttgagtacggcaagtcgttctttccggtgttgttcatcgtgctggtgctgcgctcgtttctggtagagccgttccagatcccttcggggtcgatgaaaccgaccctggacgtgggcgacttcatcctggtgaacaagttttcctacggcattcgtctgccggtgatcgacaagaaagtcatccccgtgggtgacccgcagcgcggcgatgtgatggtgttccgctacccaagcgacccgaacgtcaactacatcaagcgtgtggtcggcctgccgggcgacgtggtgcgctacaccagtgacaagcgcctgttcatcaacggtgagtcggtggccgagaagctgctgggcgccgagccgaacaccctgggcagcgccgagctgtaccaggaaaaactcggcgcggtggagcaccaaatccgcaaggaaatgagccgctaccgtgcgatgccggatggccagtggaaagtgcctgccgggcactacttcatgatgggcgacaaccgcgacaactccaacgacagccgctactgggatgaccccaacattcccaaagacctgctgggcatggtgcccgacgaaaacattgtcggcaaagccttcgcggtctggatgagttggccggaacccaagctcagccacctgccgaacttctcgcgggtcgggctgatcaagtaatacaagcggcgctgtgaacacagcgccgaatgcttttctggggcttggacattttccgatgcccggtacccatcaggatttgaatttgaacactgcgtcaatcgtcgatggccgccggtgccatcaactagatatggataaaccgtgaccgtttctctaagtcgtctcgagcgtcagctcggctacaccttcaaggaccaggaattgatggtccttgccctcacacaccgcagctttgcagggcgcaataacgagcgcctggaattcctcggtgacgctatcctcaatttcgccgccggcgaggcgctgttcgagcgtttcccccaagcgcgagaaggccagctttcacgcctgcgcgcacgccttgtaaaaggcgagaccctggccgtgctggcccgaggcttcggcctgggcgagtacctgcggctgggttccggcgagttgaaaagcggcggtttccgtcgcgagtcaatcctggctgatgccctggaagccttgatcggtgcgatctaccttgatgcaggcatggagacggccaaggagcgcgtggtcgcctggctggcctcggaaatcgaaagcctgacgctggtcgataccaacaaggatcccaagacccgcctgcaagagtacttgcagtcccgcggttgcgaactgccacgctacgaagtggtggatatccagggcgagccccattgccgggtgttcttcgtggaatgtgaaatcaccttattgaacgaaaaaagccgaggtcagggtgtgagccgtcgtattgccgaacaggtagcggccgctgcagcactgattgccctgggcgtggagaatggccatgactgattcaaccgcaacacgctgtggctatgttgccatcgtcggccgcccgaacgtgggcaagtccacgctgctcaaccacattctcggccagaagctcgcgatcacctcgcgcaagccccagaccacccgccacaacatgctgggcatcaagaccgaaggccacgtgcaagcggtgtatgtcgataccccaggtatgcacaaaggtggcgagaaagccctgaaccgctacatgaacaagaccgcctcggccgcgttgaaagacgtcgacgtggtgatctttgtagtcgaccgcaccaagtggaccgacgaagaccagatggtcctcgagcgtgtgcaatacgtgaccggcccgttgatcgtcgcgctgaacaagaccgaccgtatcgaagacaaagccgagctgatgccacacctgagctggctgcaggagcaactgccgaacgcccagatcatcccgatctcggcccagcacggtcataacctggaagccctggagcgcgtgatcgccgagcacctgccggagaacgagcacttcttcccggaagaccagatcaccgaccgcagcagccgcttcctcgccgccgaactggtccgcgagaaaatcatgcgccagatgggcgccgagctgccgtaccagatcaccgtcgaaatcgaagagttcaagcagcagggcaagaccttgcatatccatgcgctgatcctcgtcgaacgtgacggccagaagaaaatcatcattggcgacaagggcgagcgtatcaagcgtatcggtaccgaagcgcgcaaggacatggagctgctgttcgactccaagatcatgctcaacctgtgggtgaaggttaagggtggctggtccgatgatgagcgtgcgttgcgctccctgggctatggcgacctgtaacgggtctcgaacacactgcaaaaccttgtgggagcgggcgtgcccgcgatgaggatgtaacattcagcagagatgttgactgtgacgccgccatcgcgggcaagcccgctcccacattggatcgacgctgtttcacgttctgcgagagagcctcatgtccgcctccccccccagccaacccgcctacgtcctgcacagccgcgcctaccgcgaaaccagcgcgctggtggacttcctcacgccccaaggccgcctgcgcgccgtcttgcgcagcgcgcgcggtaaggcgggcacgttggcgcggccgttcgtggcgctggacgtggagtttcgcggcaagggcgagctgaaaaacgtcggccgcctggaaagcgtcggcacctcggcctggctgaatggcgatgcgctgttcagcggcctttacctcaatgaactgctgattcgcctgttgcccgccgaagacccgcaccccgcggtcttcgatcactacgctgccaccttgcttgccctcgctgagggccgccccctggaaccgctgctacgcgccttcgaatggcgcttgctcgacgaccttggctacggcttcgaactggccaacgacctgcacggcgagcccatcgccgccgatggcatgtatcgcctgcaggtcgatgccgggcttgaacgtgtgtacctgctgcagcccggcctgtttcagggcaccgaactgctggccatgagcgaagccgactggcacgctcccggtgcgctgtctgctgccaagcgcctgatgcgccaggccctggccgtgcatctgggcgggcggccactggtcagtcgcgagttgtttcgaaagccctgacatccccgtgtatgctgtgcaccgattctttcccttttcaggagcgcttccgtgaccaccagcaatcgcattcttcttggcgtcaacatcgaccacgtcgccaccctgcgccaggcccggggcacccgttaccctgacccggtcaaggccgcgctggacgccgaagaagcgggtgccgacggcatcaccgtgcacctgcgcgaagaccgccgccacatccaggagcgcgacgtgctgctgctcaaggacgtgctgcaaacccgcatgaacttcgaaatgggcgtcactgaagaaatgatggcgttcgccgagcgcatccgcccggcgcatatctgcctggtaccggaaacccgccaggagttgaccaccgaaggcggcctcgacgtcgccggccaggaagcacggatcaaggctgcggtggagcgcctgtcgcggatcggcagtgaagtctcgctgtttatcgacgccgacgaacgccagatcgaagcctcccgccgtgtgggtgcgccggccatcgaactgcacaccggtcgctacgccgatgccaccacgccgaccgaagtggccgacgaactgcaacgcatcatcgacggcgtgaactgcgggctcaacgaaggcttgatcgtcaatgccggccatggcttgcattaccacaacgtcgaggccgtggccgcaatcaaaggtatcaacgagctgaacatcggccatgccctggtggcccacgcgttgttcgtcggtttcaaaggcgcggtggccgagatgaaagccctgatcctggccgctgccaaacattaataaacaatgaagatcaatgtgggagctggcttgcctgcgatagcggagtgtcagttgacgcattcgtagcaggcccaccgcgatcgcaggcaagccagctcccacaggatgagccgtcgtgtttttggcatgcggcaatgcgaagccttactgtttagccgacgcaggtgtatcgtatcagccctttgcgggcccttggcctgcggcagatacgcgaggttgttgtgtcccgatccttttcccgtcgacaaatcctgggtggtcttgctggcctggccgtagtaggcgtcggtgccggcggtggctaccgctactggctggggaaagtcgctgagtccgaggccgggcacgattacgagttgatcgccgcgcccctggacgtagagttggtgccggggcacaagactcaggcctgggcgttcggcccttcggcgccaggcaccgagttgcgggtgcgccagggcgaatggctgcgggtgcgctttatcaatcatctgccagtcgccactacgatccactggcacggcatccgcctgccgctggaaatggacggcgtgccctacgtctcgcaattaccggtgctgcctggcgaatacttcgactacaaattccgcgtgcccgatgccggcagttactggtatcacccccatgtcagcagcagcgaagaacttggccgtggcctggtcggcccgttgatcgtggaagagcgcgaacccaccggcttcaagtacgaacgcaccttgagcctaaagaactggcacatcgacgaagagggcgagtttgtcgaattcagcatcccccgtgaagcagcgcgtggcggcacggccgggcgcctctccaccatcaacggcgtgccccaggcggtgatcgagctgccggctgggcaaatcacccgcgtgcgcctgctcaacctcgataacaccctgacttatcgtctcaatattcctggcgtcgaagcgcagatctacgccctggacggcaaccccatcgagccgcgcccgctgggcaaggaatattggctgggcccgggcatgcgcatttgcctggcgatcaaggcgccgccggcgggcgaagagctgtcgctgcgcaacggcccggtgcgccttggcaccttccgctcggtcgccaataccgacgcgcctaccgcatggccgccggcattgccggccaacccggttgccgagccagacttggccaatgccgagaagctcaactttaatttcgaatgggtcggctcggtgtcggtcaatgtcgaaaacggcaagccgccgagcctgtggcagatcaacggccaggcctgggacatcaccgacaagacctgcgccgaccgcccgattgccaagctggaaaagggcaagagctacattttcgaattgaagaacatgacccagtaccagcacccgatccacctgcacggcatgagcttcaaggtgctcgcgtccaaccgccacaaggtgatcccgtatttcaccgacacctacctgctgggcaagaacgaacgcgcccgcgtggccttggtggcggataaccccggggtgtggatgttccattgccatgtgatcgaccacatggaaaccggcctgatggccgccatcgaggtggcgtgatgcgccagattcgccccgccgcgattatcgaccgcagccgcgaccaggactttatgcgcgaagccctggcgctcgccgctcaaggcgctgcattgggcgaagtgccggtgggtgccgtgctggtgcaggacggtgaaatcatcggccgcgggttcaactgccccatcagcggcaacgaccccagtgcccatgccgaaatggtcgcgatccgcgccgctgcgcaagcgatcagcaactatcggctggtgggcagcacgctgtacgtgacgctggaaccgtgcagcatgtgcgcgggtttgatcgtgcattcgcggattgcgcgggtggtgtatggcgcgctggagccgaaggcgggcatcgtgcaaagccaggggcagttttttacccagggttttcttaaccatcgggtgttgtttgaaggcggggtattggccgaggagtgtggggctgtcttgagcgagttcttcaaagcccgacgagctaaaccgtgatgatcgttcccacgctctgcgtgggaacgcagcacaggacgctctgcgtcccaaagcgtgacgcagagcgtcacaagaggcattcccacgcagagcgtgggaacgatcatagtggtgttatttgcgagcgataatcaccgcccgcatcggcgccggcagcccttcaatggtcttgctgtgatcctcaggatccagaaaatcactcagcgactgatacttcatccactgcgtcccacgctgttcctcaaccgtggtcacgctcacatccacgcaccgcacatcactgaaaccggcccggcgcagccatagcatcaacgccggcaccgacggcaggaaccacacgttgcgcatctgggcgtaacggtcttccggcaccagcacttgctgttgatcgccctccaccaccaatgtttccaacaccagctcgccgcccttgaccagggtgtctttcaacgccagcaaatgctcgatgggcgagcggcggtggtagaacacgcccatggaaaatacggtgtcaaagccttccaggttcgccggcaagtcttcgaacgggaacggcaggtgccaggctttgggctcagccaggtagcgctgcaccgcctggaactggcagaagaacaaccagttggggtccacgccaatcacgctgtcggccccggcgccgagcatgcgccacatgtagtagccgttgccgcagcccacatcgaggatgcgcttgcctttgaggttcaggtgcggcgcgacccgcgaccacttccagtccgaacgccactcggtgtccacatgcacgccgaacagatggaacgggcctttgcgccaagggctcaggcccatcaaggcggtgtgcatttgctcacgggtggcgtcgtcgcaatcggtgtccagcaccaggccgttgagcaggtcgacttcactgggctggatcttcggcagtgcatccaacgcactctgccagcgctccaggtcgccatgacccttttccatcttgctatcgagctgcgcttgcaggccctgggcccacacggccaggggagtgccgaccaggtggcgggcgaggggggacaaatcaatcatggcaaggcaatcaacgaggcaaagttaagacactggaaccacggcacgactttcgagaacccggccgccagcaggcgttcgcggtgttcttcgaggctgtcgggcttcatgacgttttcgatggcgctgcgcttctgggcgatttccagttcgctgtagccgttggcgcgcttgaaggcgatatgcaggtcggtcagcagcgcgtgttcttcaacatcgttaaagcgcagcttttccgacaggatcaacgccccgcccggcagcagcgcctggcgaatgcgccccagcaacgccaggcgctcctttggggcgataaattgcagggtgaagtttagcgccaccaccgaggcgggcttgaattgcaaggcgaggatatcgccctcgatcacctccacgggcagcaactcctggaacatcgaatcctggccattgaggtattcgcggcagcgctcgaccatcgcggcggagttatccacggcgatcacccggcaaccctcggtgcgtacatggcggcgcagggcttgggtcacggcacccagggaagagcccaggtcatacagcacgctgtggggctgggcaaattgcgcggccagcacgccgaggttttcgacgattgtggggtaacccggcaccgagcgcttgatcatgtccgggaacacccgcaccacatcctcgttaaaggcgaagtccggcacctggggcaggggctgggcgaataggcgatcgggttctttgctcacggctgttccggcgacgatgggggaaaggccggcattttagccaagttggtcctcggatgcgcgggttgtctgatggaaagccgaggcggtgatgccccactgcccgagccagtaggtggcgatcagtaaatacggcgccgcctcgaacgccagcacaaaccggttgatgccgatcagcgcgtcggaaaccacaaacgacagcgcacccgctgctgccagccacgccgaacgtttgggcacctcgctgcccagtcgcgccaacgcccgccagagcatggcgctgatcaccagtgcgtaaaccaccaccggtatcaacagctcaccgaggccgtgggctatcaagatgctcagcaagattgcgccaacgccgagggccagcaccagcggcagcagcgccaagcgccgacagtcactgaaataggctttgagataggccagatgtgcgaacagaaacgcgcccaggccaaagataaacaggtcgcctggccaggcgagcaacacgtcgccccccacggaaaaaatcaagcccaggctgatccagcgtcgatactcggtgggcggcgcgtcatgcagccaacccagcagcgccagcaccggcagcggcttgaccagcaggcacagcagcgttgcatgggtcgccaggccgtagacaaaggtgccggcgcccatcaaggcaaggatcagccatggcatatcagttcaccgtaatggcgcagtcaaaggtttcgacaggttcggcctccggctcccaaggttgctgggatgtcaggcgcaaacgcccttgccctggggcaaacgcctggaagcgccaggtggactggccgccaccgccaatcacgccggattcggtgctgctgtagacctcagggctcaaggcgcgcaacacgccgccagcggaatcctggatggcccagcgatagccggtggtgggattgctgggcagggtgaggatcaggttttgcccgttttcaagctggagcgggcaggcgctctggttgtccacgctgacgttttgcttgggggcactggcgcatccggccagcagggcaaggctcaaggggagaaacaggcgggcagcggtcatgaaggctccgttaatacacgacgaagggggagcataaccgaagatgagacaaggtgtgacaagagggcatgcggtgtggcggctggcgccatcgcggggaagcccgctcccacacttgaccgcgttgtcattaacaacaccgatccctgtgggagccgggcttgcccgcgatagggccagtccaggcgctagagatctatcagaagagcaccttcgccacatccgcaaaccgcttggcaaagtgcaccgtcatgccttccttcaaataatccggcaactcctcaaagctgccacggttgggctccggcaagatcaactcgtgaattttctggcgccgcgccgcaatcaccttctcgcgcactccgccaatcggcagtacatgcccggtcaaggtcagttcgccggtcatcgccacgccttttttcggcggttggttgcgggccagggacagcaacgcactggccatggtcacgccagcactcgggccgtctttgggggtggcgccttccggtacgtgcaagtgcacgaaggcttcatcgaagaacttcgcatcgccgccaaacgacttaaggtttgaactgatgtagctgtaggcgatttcggcggactctttcatcacttcacccaactgcccggtgagcttgaagccgcggttgagcgtgtggatgcgcgtcgcttcgatcggcaaggtggcgccgcccatgctggtccaggccaggccggtaatcacgccggtgccggacagcacttgttcattacggaacacgggcatgcccagggagctttccaggtccttgttgccgatcttgatcaccgagtccggttcatccagcagcttgaccaccgccttgcgcaccagcttgcccagttgcttctccaactgacgcacgccggcctctcgcgcataaccgtcgatcaacgcgcgcaaggcaccatcactgatggtcaggctgtttttggccacgccggctttttccaactgcttgggccacaggtggcgcttggcgatggcgactttttcttcggtgatatagcccgacaggcgaatcacttccatgcggtccagcaacgggcccgggatcgagtccagggtgttggcggtgcacacgaacagcactttggacaggtccaggcgcaggtccaggtagtggtcgaggaattcgacgttctgttccgggtccagggtttccagcagcgccgacgccgggtcgccctggaagctctggcccatcttatcgatctcgtcgagcatgatcaccgggttcatcacttccacgtctttcaacgcctgcaccagcttgccgggcagggcgccgatgtaggtgcgccggtggcccttgatctcggcctcgtcgcgcatgccgccgacactgaagcgatagaacggccgccccagggattcggcgatggacttgcccacactggtcttgcccacgcccggcgggcccaccagcaacacgatggagccggcgacttcgcccttgtaggcgcccacggcgaggaattcgaggatgcggctcttgatgtcatccaggcccgcatggtgcttgtcgagcactttgcgcgcgtgcttgaggtcgagtttgtctgcgccgtacacgccccacggcaccgaggtggcccagtccaggtagttgcgcgtgacggcgtattccggcgaaccggtttccaggatcgacagtttgttcagctcttcatcgatgcgcttctgtgcctgggccggcaacaccttgccttgcaggcgctgttcgaactgttcgacgtcggcgctgcgatcgtccttggtcaggcccagctcctgttggatgactttgagttgttccttgaggaagaactcacgctggtgctcgccgatcttgcggtttacctcggcggagagttctttttgcaggcgcgcgacttctacctctttgcgcagcatcggcagcactttttccatgcgcttgagcatgggcacgcagtccagcacttcctgcagctcattaccggtcgccgaggtgagggcggcggcgaagtcggtaagcggcgacgggtcgttggggctgaagcggttgaggtagttcttcaactcttcgctgtacagcgggttgaggggcagcagttccttgatcgcattgatcagcgccatgccgtaggccttgacctcatcggtcggctcgctgggctggtgcgggtattcaacctccaccaggtacggtgggcggtggtgcttgagccaggtcttgatgcgcacgcgggtcaggccctgagccacgaactgcagcttgccgttctcgcggctggcgtggtgcaccttcaccagggtgccgtacagcggcagggcggaggtgtcgaagtgccgtgggtcatcgggcggcgtgtccatgaaaaacagcgcaagggaatggtggtcggatttgctcaccagctccagggtttcggcccagggttcttcattgacgatcaccggcaacacttgggccgggaaaaacggccgattgtggatcgggatgatgtagaccttgtccggcaggttttgcccaggcagcgccaggccagtattggacgagggggcttcagcgttttcggggtcggcgtaatcgttgaggtcgtaatctggaaattcttgctggtcgctcatggggcacctgcatcagtaagtatgcaggttagatggggcggggttgcggtggtttcaatggggcggcgtcgttagcaacaatttgcatgaaataacgggagaggcgcggtcaatgtgctttatgcctctgcttttcgaactgatcgtcaataatgtgacagcgaagcccagcttttattgggtttacttatctccagtcccagctaacctgctttaataaaattccccataaaaaaggatgtttttttgacgccggttagcagtcggcagggacgcgtatgacaccaggaaagcacggccaagagcgacgagcacggcccgagggcgcggccatgcactggcgccacacgtttcagacccgtattgccggggtgttggcgctgttgctgctggtggtcgtggccgccacctattttgccgtgaaggccgccaccactcgcgcggtggagaaccaggccgacgtgcagctgaacacggggcggcaggtgttcgagcgcctgctggacctgcgcgggcggcgcttgcagtacgggttggactggctcaccgccgatgggccgttcaagcaggcggtggccggtggccgcacggtgccgatcctggacgcgctgggcacccatggtaccggggtcagttccagcgaagtggtggtgctgggcctggatgaccgggtcatggtcagtactctgctggtgcagacgcgcggccagctgttcccgtatgccgatgccttgcgcaaggcgcggcgcagtggccagcaaatgttgatcgtcgccatggccgggcgcccctatctgctggtgcaaaaggatgtgctcgggcctgtgcccatcgcccgcgtggtcatgggtttccccatggacacgcaatttgcccacgagctgcgttccatgagcaacctggaggtgtcgttcctcagtgtgcaggacggccatctcggtcagctattcaccacccaccctggcaattggcgcccaagcatcatcagcctcttgcatggcacgcaggtcgatcctgaggcgaagatccagctgttccatggccagcgtgtgctcagccaggtgttgcccttggccaatagcggcgagggcgatgaagtgcgcgtgttgctgcaaagcccgctggaccatgcgctggaatccttcgcgccgctggaccggcagttcatggggattgccctggcggtgctgctggtctcgctggcggtggcgttattcctggcgcggcgagtgtcacgcccgctcaatgcgctggtgcaagccgctgaacgcatcggggccggtgactaccgcaccccggtgcgggtgcgcagccacgacgagttcggcctgctggcgcgtgcgttcaatgccatgcaaagcggcatcgccctgcgtgagcgacagttggctcacaatgccttgcatgacccgctcaccggcctgcccaaccgcgccctggccatggagcgcctgggcagtgcgatcagcgcacggcggtcggtggtattgctgtacgtaggcattgaaaactaccgggtcatcaacgaagggtttggccccgaaggggtcgagcatatgttgtgcgaggcgagccgctgcttgtccagcagcctgttggccagcgacactgcggcgcgcatcgccggcagtgagtttctgttgttgttggaaaacaccgagatcgactctgccgtggcccgcgccgaccagttgcatggggcgttgaccgaacccctgcgcatcggcaatgacgaagtgcgccatgaggtgagcatcggcatcgccgcgtaccctgctgacgggcagcaggtggaagaattgatcaaccgcgcggccatcgcccggcacgacgcggccaacctgccggggcatttgcagatctaccaaccggaccgcgacctcgcccaccaacgccagatcaccctgatccgcgatttgcgccgcgccgtgatcgaaggcgagttgttcctgtgctaccagcccaagcttgacctgcgccgcgggcacgtgagccaggctgaagccttgttgcgctggcaacacccgacgctggggcaagtgtcccccgcagagttcattcccctggccgaacgcaccggcagcatgggcgcgctaacgctatgggtgatcgaggaagccatccgccagattgccgaatgggcgcagcgtgggctggttatccagctgtcggtgaatatctccgtgaacgacttggcggatgatgacttggcgattcgcgtcactgcgctattggcccaataccacgtgggcgccgagcatttgattttcgagattaccgagagcgccatcatgcacaacccgcagcaggccctcagcgtgctggagcagctgcgcaattgcgggatcagcctgtcggtggatgatttcggcaccggttactcctccctcgcacagttgcagcgcctgccggtgcaagagctgaagatcgaccagtcctttatacgcaacctcgacagcaccagcggcgacggcgtgatcgtgcgttccaccatagaaatgagccatagcctggggctcaaggtggtggccgagggcgtggagttcgaacacagcctcaccctgctcaaacgctggaactgcgacaccgcccagggctacctgatcagccggccgctcaatgccatggcgttcgagcggtggatgcggcgtgaacgggtgcctacttagaccagtgtctgcagtcgcgcccacaacctttggacatgctggcgttcggtgcccagcgcgccgatggatacccgcaccatccagcgctcatcgaggagggcgggggtgacgtaggcatcgcctgactggttgagtttttctgcccaggctcgggtgtgagtatccagggcctggcctgccaaccccggcggttcatggcgaatgcaaagggtttgcaaggcgggcgtggccaccagtgtccagtgctcagtggcttcaatctgctctgccagccagcgcgcattggccaggtctcgccgcagccgcgcttgcaggccgctgacaccttgctcgcgtatcaggaaccacaacttcaaggcgcgaaaacggctgcccagggaaatccgccagtcacggtagtttcgcacttggccgtctgcgctggattgcaggtagctcgggttggtggtcatgatgcgaatcaaatgctcggggtcacgtacaaagtacaccgagcaatcgaaggccgcgcccagccatttgtgcgggttgagcaccagcgagtcagccttttcgatgccatcccacagggcccggcattccggcaggatcattgccgcgccagccatggccgagtccacgtgcagccacaggccgtggcgttgggtgaggtcgccaatcgcatccagagggtcgatcgccatggcagccgtggtgccggtggtggcaatcaccacgcagggtgtgttgccagcggccaggtcctgttcgatggcctgcgccagtgcctggggcgacattgcattgtgtgcatcggtggcgatggtgcggatatggttctggccgaacccggccaggatcgccgccttgttgaccgagctatgggcgtgggctgaggtgtagacgatcaggggcgcgccgctgttttgcaggccgttgtgcatcagcgcgtaatcggagctgcgttcccgggcgctgataagcgccaccagcgtggaggtggacgccgagtcctggatcacaccgctccatgagctgcccaggccgagcatgtcgcgcagccaatcggtggtgacttcctcgatttcggtgagggccgggctggattgccaggacaacccaatcacacccaggccggtgctcaggcaatcgccgagcactgaggacagttccacattggaagggaagaacccgaagaaactgggatgctgccaatgcagcaagccgggcatgatcagtttttcgacgtcgcccatgatttgttcgaagggttcggcggtgtcaggcgggctggccggcagggcggctttgatctcgccaggttgggtggtgggctgcacgccgcgttgttcgatgttctgtcggtagtctgcaatcaggtcgatcatggcatagccatgttggcggaattcttcgggggtcatagataaacgtccatgtgcacgagcaataaaagtattagcaccagaagtaaaacggttcgccggcgttatagccaataaacgactgcatgctgacgcgttttcccgaatcgaacccacagatggcgtgggggcggcgggtattgatgagcaccagttcgttctggcgtgggcggatgcgcagcggtttttgtaaacactgttcgggcagttgggccccctcgaagcgcttgacctcctcatagccaaaggcttgggtatcccagatgaccaactcgccccccgaaggcggtgtttgcaggtagatattggcgctgaattgatgctgcagttcagcgactgtgcggggcaggcaatccacatggggcaccgtttccgagaggtgcgccgtctccgggaacatgacgcggatgatcccgcaaaacatcggtcggccctggaacgcagcggctgttgcaccttgcggccagagcgcctggaactgttccatcagctgttgaatgggcggcgtttgcggcgcacagaggctgtcgataaggccgcgcatacgggccgcgtctgcataatatttttcttgggcgtcaccgccggcggccttgccgtacgtggagttgaacggcgtgccccagcgatgcacaccgtagaagtgctgaacgacgcgcccctcttcgtaggtttcatggccgtagtgttccagggtggcggtatcgtcgatggcctgaatcaaccgtgcgctggtggttgcgttggcaaactcaggtacccgaatggcaagcacttcgccactgatgagttttttcaaactggcagtattgaggtgttcaagctccaggatttttgtgggggtggaaagcatcggttttgtagcgacatggtccgtcatgcagtgaagctccctttaaagttttatccgtacgccttttgtattacgcagggcgtgcgcactaaattagttttaaagggttgaggggaaacgctgggcattatcagcaggcaaaaaaaagcggctgcccattcgggccgccgcttttttgtaccgccagcgttgcttaatccggcagtttgaacgccattacatagtcaccctgcttggtccccagggagccgtgaccgcccgccatgaccagcacgtattgcttgccgtccttgccggtgtaggtcatcggggtggtttgcgcgcctgcaggcaggcggccttcccacagttgcttgccgtttttcacgtcataggcacgcaggtactggtccagggtgccgctgaggaacgcgacgccaccagcggtggtgaacgtaccgcccaggctaggcacgcccatggtcagcgggattggaaccggcgagctgtcacgcacggtgccgttcttgtgcatccagatggtctggtggttggtcaggtcgaccgccgccacgtagccccaggccggtgcctggcatggcaggcccatcggcgacagcagcgcttcaaggatcacaccatacggcgcgcctttgtttggctgcacgccctcggtttcgctgacgcgtgggccttgcttggcgatgtcagcggccgggatcagcttggatttgaacgccatgtagcttgggttcacgaaggcgatctggcgcaccgggtcaaccgagatgccgccccagtcgaacacgccgaagttgcctgggtacacgatcgaaccttgcagcgacggcggcgtgaacgggccgtcgtagcgcatggatttgaagtcgatccggcacagcatctggtcgaacggtgtcacgccccacatgtcgcgttctttcaacggcggcggcatgaagttcaggtcggacttgggttgggtaggggaggtgcggtcgcccgcgactgcgccctgtggcaccgggatttcattgaccggtaccactggctggccagtggcacggtccagcacgtagatgctgccttgcttggtcgacgccatcacggcctgcttcacgcccgcagcggtcttgatgtcgatcagcgaaggctggccgcccacgtccatgtcccacaggtcatggtgggtgaactggaaggtccacttcacgtggccggtgtcgatgtccagagcggtcaggcccgcggcgtacttctcggagtcatcggtacggtcgccgccgtactggtcgggcatctggttgcccatcggcaggtagagcatgccgagtttttcatccacggcgaacatggaccacatgttcggcgagttgcgggtgtaggtcttgccttcggccaacggggtggtgtcgtccgggttgccgctgtcccagttccacaccagcttgccggtgtgcacgtcgaacgcacggatcacgccgcttggctcgtcgatggaaacgttatcggtcacgtgaccgccgatcacgaccaggttcttggtcacggccggtggcgacgtggagtagtaaccgcctggggcgaagctgccgatgttggcacgcaggtcgacctggcctttgtcaccgaagtcttcgcacatcttgccggtgtcggcgttcagggcgatcagacgggtgtcggcggtcggcacgaagatgcgtttcgggcaggcgttcggtgcggcggccgggctggcagtgccagtcgggctttgttcggaagcgtaggcagcgtcatcgtggtacgacacgccacggcaggtcatgtgcgcccaacctttgaagctttcagcaccctgggtggtgatcttcgggtcgaaacgccagatttccttgccggtatccgggtccagggcaatcacttggctgtgcggtgtgcacacgtagagcatgccattgactttcagcggggtgttttccgcggtggtttcaccggggtcgcctgggccagggatgtcgccagtgcgataggtccacgccggcaccagcttgtgggcgttttccggggtgatctgtgccagtggcgagtaacggtcaccgaaggccgaacggccataggaattccagtcgccatcggcctgggtgggcgcagcgctggccatgcccggtaccgcgtcgcggtccagttggccggtcttgaccatttcacctgggttggtgaattggctggccagtgcggtagcgcccgccagcaccacggccacgctcagcgcgccagtgcccagcggggccgcttggccacgcagcaacggacggcgaaaccacggcagcagcatgacgatgcccaaggcgaacagcagggccaggcgcggtaccagttgccaccagtccaggccgacttcccacagtgcccacacggtgctggcgaacaacaccagtgcgtacaagcccagcgcagcgcggcgggtagccagcagcaacacgccggtcagggtgatgccgataccggcgagcaggtagtacagcgacccgccgagcatgctcagcttgacgccgccagccagcaaggccagccccatgatcagcagcaagacgcctagcagcctgggcaacaggcggcttgggcttgaagcaccatcagtgctcatagtgtgtttctccgtgacgttggaataattatgtaaccccgtgcttcactgtagatgacgattcagcacgggcttggttcatcgttattttcgggtttttctgtggataaccgggttatccacaggcgggcaacagagtccctggcgcaggtcggtttaagacagcgctgtctttgcgtgaagggaaattcggcaaatgggatcgacccggaggtgaagcgtttcagattgttgcgaaggataatgcggcggggcgttttgagaaagggtgaatcgcaagatgcatcatttcagttttggtaacagtgacagatagtcgctgcacaatcacgtcgcaggcatgtccccaatgccgatcgatcaagcgaacgcaatgctcaaagcaacgaagatcaaatgtgggagctggcttgcctgcgaagacgtcggcccagcaaacagtgatgttgactgacccaacgctttcgcgggcaagcccgctcccacaggggattagcggtgatgattagaaggtagtgcgaacgccgaactgcacgcttctacctggcgccggcgcgatatcgcgcagaatcgagctggcatagcgcacggtctgattggtcaggttttcaccgttgacgaaggccagccactggctaccgcccacattgaagcgataccccgcgctggcgccgagggtggtgtagccgtcggtgccgctttcgttatccggcacacgcccttggcctgcggcatgttccacatcgatacgtgcttgccagcggtccagttcccacagcaggccgctgctcatgcgcaggggcgcgatgcgtggcaaggcttcgccggtgtccaggttggtggcgcgggtgtaatcgcccgagagttccagcgcaaacttaccgtaggcgccttcaccgagcttccagtgatcctgggcttcgaagccggcgaaacgcgcgcgcacgccagaatattcgtactcgggaataccgcccgcgtcctcttcgccttcatcgttcagggtacgacccgtgcccaacaagccgatgtaattggagaagtggctgtagaacacgccgaagctgcccttgtgggtgccgttgtcaaagcgcagggccaggtcgctggacacggccttttctttcttcaggttggcatcgcccaactcgtaggtaccggtggcaacgtgggcgccgttggcgtacagctcgtaaaaggtcggcgcgcgttcggtgtagccgagggtggcggccagggaccagatcggcgtgagggcgtacaccgcaccagacgacaggctaccggcggtgaagttactgctcttgtcggcattggcaaagcgctcgttgcctttggcgttcgggtcgacgctggtgtgttccagacgtgcgcctaggctgagtttgaggcgctcggtggcttgcatttcttcgaggataaacagtgcgccggcgttggtgtcggtctgcggtacgaaggcttcttcgcccagggccgagaactcgttgcgcgtcacttgggcgccgaccacgccatcgaatgggcctatcggctggtgacgagcttccacccgcgcttcatagcctttgttcttgaaggtggtgccggtttcgccgccttcgatttctcggtgttcgtagtcggtgtaaccggcgtcgagtttcaccgaggtaaaaggcccttgcaggttgcggatctcggacgcaaaggcgtagtggtcctgtttcatgcggatgcgcacatcctgctcggcgggtgagccgtagttactgtcgtaattgctgtaggacagccccgcataaccatcatcccaggtgtaggaaccgcctaccgcaccaccgtcctggcgcccattgctgttacccaggcgcccgtttttgccggggccgttttcgctctccggtgcatgccggctgcgggcatagcctgggattttaaggtcgttgaactcgcgcgcatcggcatccaggtgcaaggcgaacgtaccgttgccggcttccagcttgcctgcgctgctgcgggtggtgtcggcaccgccgtagcgcagttcacccgcgccatggatgccttcaatggcctcggtggggatgcgattgtcgaaggtattgaccacaccaccgatggcgctgccgccgtacagcagtgcggccgggccccgcacgatttcaatgcggtcaacgttgatcgggtccagcggcaccgcgtggtcgtaggacagcgacgaggcgtccagcgcccccacaccgttgcgcaggatgcgaatacggtcgccgtcctggccacgaatgatcgggcggctggcccctgggccaaagtacgaagacgatacgcccggctgcttgttcagggtttcaccgaggctgcctttttgttgcagggtcaggtcgtcgccttccagcacggtggtgggcgaggccagctgttcgctgcccagcgggttgccggtgaccacttggggtggcagttccagggcatgggcctgggagccgatcaacagggcggcggcgaggggcgacaagcgccagatagaaggcagcgacatcggatattcctaggcaaaaaggttgttaagtaaagttacaatataacatctcttttttgcgaaaaaggggaacttttcctcgcgggctatattcaatccgatgcttccacctgcacgccccgtcggctaaggtgcgcggctgtgtttcctctttttgcaaaaggcctggcatgaccgcgacaagcaacgacccgctccacggtgtgaccctgcaacacgtgctcaccaccctggtggagcattacgagtggagcggcttggccgagcgcattgatatccgctgcttcaagagtgacccgagcatcaagtcgagcctgaccttcctgcgcaaaaccccgtgggcgcgggaaaaggtcgaaggtttgtacgtcaagctgatgcgtaccaagcgccccctggattgaaagcatgaagcgctttgtcgcgacggcagccttggccggttgggtggggttggcgatccagcaatacctgattctctatttgcgctggaccagtggcgcgagcttgctgggcggcctgatcagtttcttcagcttcttcaccgtgctgaccaataccctggtggtcgtggtgctcagctacgcgctggtcaagcgcgactctggtgccaagcggtttttcctcgcgcctcacatcagtagcgcgatagcggcgagcatcgtgctggtgagcctggcctacaacctgctgctgcggcatctgtggagcccgcaaggctttcaatttatcgccgatgaattgctgcacgacgtcatgccgttgctgtttgtggtgtattggtggcggtgtgtgcccaagggcaccttgcggttcaagcacattgccggctgggtgatttacccattggtgtacttcggttatgtgctgctgcgcgggcatatgctcgggcagtatcagtacccgttcatggatgtggacagccttggttatccacaagtgtttgtgaatgccgcagggattttggcagggttcatcgtcatcgcgctggcgatcatcggcctggacaagcacctcaaatctccctcgatctaaagtgagcaccattaatgtgggagctggcttgcctgcgatagcatcacctcggtgtaactgataaaccgaggtgtttgcatcgcaggcaagccagctcccaccttatttattcttcctcgctgccctcggcacgccagtaacccacggccttgaggtattgctcgttgaccttgtgcgcatccagcagcacccgccgcacctggcgcgacagcttggtttcggtggcgacgaagctgtacagcgtgccgctgggcagcgtcaggttactcaccacattgagcaggtcatcctggccacgcagcacccagatcacctcgacctcggctgcgctgttcagcgcctgttgttccgccgcatcggcgatttcaatcaccgccagcaccttgcgcccagcgggcagttcttccaggcgccgagcgatggccgggatcgccgtttcatcgccaatcagcaggtagctgtcgaagatatccggcacgatcatcgagccacgtggcccgccgatatacaggtgctggccgacttcaacttgctcggcccaggtagacgcagggccatcgccgtgcagcacgaagtcgatgtccagctcgccaatgctcaggtcgtaacgccgtggtgtgtagtcacgcatcgccggttgcgggccgtcgcccttgatgttgaacgtcgggctttccagcgcggcttgttcttgggcgttctgcgggaacaacagcttgatgtggtcgtcgctgcccaggctgataaagcccgccaattccgggccgcccagggtgacgcggcgcatgcgcggggtgatatcgaccacccgcaatacttgcaggcggcggcgtttgatttcgtgggttacgcgatgaatggtttgtgtgttcattggtctgtcccgtcggcaatggcttgggcggtgcgattgagcagcgccgcgacacgaatgatttcttccgggctccagtgcccgttgtgtgaatgcaaggcgtggcgcaggttgtgcaccgcttcatggatttgcggtgggcggtcgtggccacgcagcgagcgcttgctgacatccaggcgcatgcgcacaccgtccagggcaacggcttgctcgcttaagaagagacgaccggggtcggtgattgtgtagcgtttttttccgccatcggcgtcgccgctgatcagctcgctctcttcaagaaaggtcagggtggggtagatcacgccggggctggggctgtaggcgccgtcgaacaggccctcgatgcggcggatcaggtcgtagccatggcaaggttgctcggcgatcagtgacaacagcagcagcttcaggtcgccaggggcgaacacccgtgggccgcgaccgccgcgtttttcaaactcgccgcgatgttcgtgtttcatgggcaggtcctctgtgcaggtttagatataacgtaagatatatcttaatgctaaggatagtacctggcgaccaacggtcgttggcggttgcacaggcttggtccgcgaagcaactaacaactattggacctgattggattttagagctataactttaattagagttgtagctcgaatttatatctgaacttgttatttgtcaggcgctgcttagtcttgtggtacgcttcttacagcaacttctttagcacatttttagcgtgtagcttatttcctacggatacttttaaagttttggcgaaatgccatctttttcgctcaagccctgtttacaagggctacgtgcgttttggaatgtgcctgcatacctgcttttagtttggcttgatcattgtcttgcagtgcgtagttcaactaactacgcctgctaattcgttgttagggacctccttggcaatgaaccattcaatgttgtcaactacaggtattgaccatgtttaagaagtttgctgtcgctgttcccctggccgttctggcgctatcttcctcggtaacggctatcgctgccggtgaagccagccacaccgtcaacctcaaggcaaacatcccgaccaccgtgttccacgcccagccgcgtgatccgaactggggtcgtgacgaaaccatgacctacaacctggtcagcggtgagttggcgcccctgagcgccatctacgacatcaagaacaccaacggttcggttcacgcctacatcgaaggcggcccggctgtgctgttcaacggtgatgccgcgcagaacatcgcgctgaccaccaccctcaatggcgtgaccctgaccggctctccgcaggaagtggtcaatgaagccgactccaccccaggtattggcgctgaaatgcgcatcgtcgcggccaagccttcggctactcagcgcggttcctacaccgcggtgatgccggtggtattcgacgcggtattgccaacgctttgatgtgccaatgaatgcccgttgaacacgggcatttacttgcaggtcggctgactttcctcctcggtccgccggcctggttttttccagtcttttggcattcagagtgttccgttcatgtttccgatgacgcctatcgcgacggcgcttgcgctgttgatgtgtacgagtgccctggccgtacctgctgcctcgggcgctttgactaccggcaatctgctgagtcaggcccaaggcttgcccgccggttttgccgatcactttttcgacgtgccgctggcggtacgtgtagaccttgaccagcagttgctgggcgaggcactgattgtgttgacccgggatgatcgcgtcaccctgctcgagttcaccgacaccggtgacagcaaggtcccggccgccacccgcgacacctggcaagccctgctggaaaagggcgtggcgctgggtgcctgtacccaatcctgtccggaaaaaatgctctcggcgttctacaacctggaaaactcccagttggcgatcatcactcagaatgtcgagctcaatgacgatgcaccgcgcttttaccagcaaccggaagacggcagcctggggttgatcatcaacaaccagctcaacctcaacggtggccaggacaacaaactgggcggtcgctacgggctgcaggccagttccagcattggcaactggagccaggtgttcaacctgcaactggcgcgacagagtggcgataacgaacagatgcgccacgcgatccatgagctgtacacccagcgggaaatggaagggcaattttttcgcctgggtcatttcacccccaattccgacggcctgacccgccaactgcgcagcttcggtgccagccctgacacagcgctgggcctgatgtacgggagttccgacagcttggccatcaacaatgccaagcccagcgtgtacccgatctatgtcaccgccaaccgccaggcggcggtggagatttaccgcaacggtctgttgatcaacacccaagccgtggcagccggcctgcaaaccctggacacccggccattgcccggcggtatctatgaagtggaagtgcgcctggtggaagacggcctgaccaccagcaccacccaggagttggtgtacaaacccagcaactggcgcaacgccgaagacccgtggcgctacaacctgtttgccgggcgcgagaccaagctgttcagcaattgggacgaacaagcctctggcgcgatgactgcgggcgcgtccatcaactacctgttgcacccacgggtgatcctcggcctgtcggcacgccaggtgcgtgaacaactgcagtacggcggttcggtggactggacggtcgccaacaacaccagtctctacaccaacctgtaccagacccaggaccacggcaccggcatggacctgcaagcgctctacaccttgggcgccaccaacctggtgttcagccacacgcgcagctggctcgacacccgcgacacctacgaaaccctgccggacggcacccgcctgcgccgcaataccttcgtgggcgaggccagcaacacggcgctgtcggtcaaccaccggctcgatgcgaaaaacaccctgaacatgcgcctgtcccacagcgaaggcaatgtcgagggcgccggtatcgacctgggttggagccgtcatgacaagctgttcggcagcgatgccaactggcgcttctcggtgttcgaccggcccggtacctcgggtaccaacgacgcgcgcaatcgtggtgtagacgtaagtgtcagcatgaacctgggccgcgatggccggcagatctccggcagcatcggcacccgcaccgcccgtgacggcgggcgtgacaacaacgcctcggtgaccttgcgccaagacctgaccgaccacttcctgcaaagcgtctcggccacggcgatcaccgacacctatggcgtcggcctgtcgggcatggccagtttcaataccgacgcgatcagcggtgacggcttcgtgcagcgcagttccttcaacggcgacttcagcggtggcctgaacctcaacagcaccctggtggccggtgccggcaaggtattgctgagcagccagtaccagggcaacggtgccggcatgatcatcgacgtggaaaccgacctcgacgagatcgccttgcgcgccgatgacctgggcggcggcagcaccctgttgcggcccgggcgcaattatgtgccggtgtcggcctacaagagcagcagcgtggccttcgactttgaaggcaaccacccaccggcggccaatatccagccggcgcgctccagctaccacctgaacaagggcggtgtggactaccgcaaagtcacggtgatgaaaaccgtcaccgtgctgggccgcttgctggatgaacacggcacacctctgcgcggccaccacgtgatcaatcacgccagccgtggggtcagcgaagtagatgggttcttctccatggaaatgagttccagctcacccaccctgcaagtgcgctaccagaaccagctgttgtgccagttccgtctggaccccagcaacgcgccaagcgaaagcgacgtgctgatgatcggcgacttgcgctgcacgccggatacgttggccgaagtcgcccatgcgtcagaggcggccggatgaattttttactcagaacagcatgcgttcgcagcaacgagttgatcagcatgaacaagcctggcaacacaatgtggcgcgctgtcgtattggccgcttcgttgggttcgttcaccccttggggccttgcggccacgcaagacattaccgctgagttccgaccggaccctagcaatcccatggtgaacaggttcaccaataccaccccgcagagcggggtatgccctgggcatatgccggcacggtgtgaagcattggggattttcagtatccgcacctgggatatcaactttgtcgccaccggcccgatagaggccaaccatgcggatccgcgtcaaggcttgatgttcaaggtcccctccgagtggcgcagtttcgaggtgatatcacccaagggcgaccgcaaaaccgtcgagatgcgtatctcgggtattggcagccgtttcaatacaaccaaccctccgggcgtgcatgcgtggagttcattacccgccaactggacgcatccaccttccccctgccaatacaccggcatgtgggcggcggcccccacgttgcggctgtggttctggctgataccggaaggtggcggtgcgtgcaatctagtgacgccgttcaatgttccctcctccagtttcagcatgcttgagtacacatatgaactgaggacacctaaccccctggacatggatgctgggcaatacagagggtcgattacttacggggtcgggccgcaccaggatttcgattttggtgacatttaccggccaaacgatgatgtgctgaccttcaacttcgaccttcgagtggagcacaacctcaaggttgacctgccccccggaggcaaccgtatcgagctgttgcccgaaggcggctggcaagcctggctcaatcgcgggcggcaaccttcgaagctgttccgcgaccagaccttcgtcatctcggccagtacccgtttcaagatgcagctcgagtgcagcctggccatcggcaacacctgcgggctgcgcaacggggacggcgacgaggtgccgctgcaggtcggcgtgaccctgccatttggcttgcgcgaccagtacggccaggccgtgagcaagctgcccttgcgcctggacggttccggcactgagctgtttcagcccggccactacgtgaacagccgccccgccagcctgcactttgccgtggagcgagacgacgtgaaggaaatgctcaaacaaccgggcagcacctacaccggcgtggtcacggtgatctgggattcggaagtctaggcaggcatctaccgcacatcagccgctgggctgggttcaatcaatgaggcgtaatcaaacatgaaacaagcagtgttatcggtcgggctggtgctgttgtcgttgtccgctcaggcggggccggcgatcaacgtgggggtggtgtacgactacctggagggcgatcgcagttcctacctcaagcgtgtctataacggcggcaccagtaccgcattcatcaaggtcaatgtgctggaaatcgtctacaacgccgacggcacctccaaggaagtgccgattacttcgatgactgacgccaagggcggcgccaccaaccgtgacggcctgatggccagcccggcgcggctgatcgtgccggcgggcgggcgtcagggcacccgcttgctgtacatgggccagcgcgacacggaacgttacttccgtgtgcgcttcatcccggtggtgccggaaaaagaagacgactttgctgtcaccgatgaagagcgggccgagtacaaggacgcgctggccgccggggtcaacgtcatggccggttatggcacggtgtttttcgtgcgcccacagaacacccgtttcgacacgcagatcagccagaccaccagccagtacaccttgcgcaatgccggcaacagcgtggtggtgctcgatgagttccgggactgttcggtggcgaagaaaaccgactgtgaagccaccaccaagcaccacatcctgcccggccgtcagctggtgttcgagaaaaagcccgagcgccagttcagtttccagctgatcgaaggccgcgacaaaaaaccgatgacggtcaacagcaacgggtgatgacaatgttcaagcaactgacggcactggcggtactgatgacccctgtgttcctgggcgagccggcgcaggcgttccaggaacgccacagcttcgatgtgtcggtgaccatcccgatcgaagaagcctatgtactgccctccgagccggattggatggggcatgaccaagtgctggcgtgggacctggcgacggcgcggcttggccgcctgcgcaagaacttcgacgtcaagaacatcaacggtggcgtgaccgcccgcctgggcgacaccccgtacttgctgagcgggcgcaaccgtatcgagttgcaggtgttgttcaatcgggtgccgttgaccctggatgccacgcaggtactcagtgccgaggaggcgcgcccggggcgccgcgccgaactggagattgccgctatcgaaccacctgacggttaccgcggtggcgagtattacggcacggtgcacttgatgttcgattttcccgcgccataagcctggcgagtgaaaccttgtgggcccgcgatacggagcgattatgcgactgttcaccgttacaaaaaaatggctggggccttgtgcgctggcgctgggcctcagctgggcgagcctgccggtgcaggcgctggagcaaaacatctcggcggtgtttcgccctgacccgaccaacccgatggtcaataaattccagaacaccaccccccacagtggcatctgtgcctggcatgtgccggcgctgtgcgagtcactcaacaccttcagtattcgtaccaacgaattggtgttcaactcgaacgcgcaaatcgaggcggaccatgaagacccgcgcaagggcgcgtatttcaaggtaccgtcctcctggcgcgatgtgcaggtgacccatatcgccacgggtcaggttgaaacggtacagatgcgcatcgccggcttcggtggccgatggagcctgggcggtggcgccagagtgggcgtttgggccagaaatggctcctgggattattactggcgttatggtgcagcaccgtgtcagggggtcaggtatatcgcggcgtccagcacttttttactctacttctggaccattcctgaaaatgcaggggcttgcaacgtggtccccacctcgccgattccgcagatggtctataaccccgtcgagtatggctatgaactcaagaccccgaatccattgggcatggccagcggtgaataccgcggttcggtcagttacagcatcggcccaggaggggattttgatctcggcgatgtgatgatgcccaacgacaatacgctgactttcaacttcaccctgtcggtggagcacaacctcaaggtcgacctgccaccgggaggcaaccgcgttgaactgctgcccgagggcggctggcaagcctggctcaatcgcgggcgacaaccgtcgaaactgttccgtgaccagaccttcgtcatctccgccagcggacgtttcaagatgcagctcgaatgcagcctggccatcggcaacacctgcggtctgcgcaacggcgcgggcgacgaggtgccgctgcaggtcggggtgaccttgccttatggcttgcaagaccagtacggccaggccgtgaacaagctgcccttgcgcctggacggcagcggcaccgagctgttccaacccggctattacgtcaacaaccgccccgcgagcctgcactttaccgtggagcgggacgacgtgaaggaaatgctcaagcagcccggtagcacctacacgggcgtggtcacggtgatctgggattcggaggtctaggtttgaaagcggttgggcggccaacgactcagtggctggcacgccacccaatcaggaaccaccacacatcacctcacccgacccttgcagataaggcatcaacaacggcgccatgcctttgagcacttgcaccggcaacgccgaggtgaatttgaagccttgcgccgaactgccgggcacaaaggcggtgagtgtgccgaagtggtggtcgccgataaaaaacacaaaagtggcggtgcggttgatcgccttggaactgatcaagcgcccaccggcacccattgcctggatgcggttatcgcccgtgccggtcttgccgcccatggccattggcgtgccgtcggcctgggtgaaactgcccgacacgcgtttggccgtgccagcgtccaccactcgcgacaacgccccgcgcaaggcgctggcaacttcggacggcatcacccgtttgccggggtcgggcgtgttgaccacacgggtgtcgtaaggggtgccggcggcaaagtgcaggctgtcgatgcgcagcactttgccgcgcacgccgtcgttgaggatgatgcccatcagttccgcgagcgcggcggggcggtctcccgaactgccgatggcggtagccagcgacggtaccaggtgatcgaacggataccccaccgcttgccagcgctgatgaatatccaggaaggcttcgacttcgagcatggtgcggatacggctgtcgcgcgcgccttgatgacggctcttgaacagccagctgtacacctcctggcgttcgaactggctggccttgaccacttcgctgaaggtggcctgcgggtggttgagcaggtaaccgagcaaccacaggtccagggggtggaccttggcgatatagccttggtcgggcaggtcgtaggtgccggggccgtagtccttgtacaggcgttgcaggcgctcgtcgctgagggctgcggtggtttttacgccggtcaggtgggagcgcacgaagcggttgaaggtgtcctggtttgcttcaggaaacaggtagcgatgtacggccgccaagcgaatcgcggtggggtgcaggctgtcgaggaaggtttccaggcgcgcctgggtgtcttttttctggtacttcttccagaacttgagcaggaaggtggtgccttcgcggtcggcaaaccgggccaggtattcctggcggcgcgggtcgccgtcatccttgagcaattgcgcactgttgttggcgccggcataggtgacgtagcgcgtcaggtcgcgcatgaggcgaatgaacggcaggttgatcgactcgcgcagcgcgtcacgcaatgtggggctgcggccgttgtcttcgttgcgaaaattatggaaataatgcatcccgccgccggtgaaaaacccttcgttggggctggccgaataggtgcggtccagggcggcctcaagcatggtcgccagggatttgtccgaagcctgcagcaagtaatcgacggcccagcgactgagccggtcttgctcggcgatgtcggcctttttcaacgctgctggggtttgtgtggcgtagcgatcatgcagttcgctgatgatttgcaagtaagtggtgagcacccgcaacttggcggtggaacccagttccagcttgctgccttcgttgatatcgaagggctggtcggtgttgtcggtttgcacccgcacccgtgagccgtcggcggtgcgttcgaacagggtaaaactgtagcgcacttgcggcgtgctggcgggcgtcagcaggcgttcgccgagcaggccgatgttgcccgcgaatgccgggtcggccagttgcttgaggtaaccggtcacctggttttgcagttcggcctgcaaggtgctggtggccgcgaggtcaaggcggtcgagatcgtacagcggccggttgagcagggccgccaggcggctgcgggctacgctgacgcctttgttgctgtcgatcggttgcagtgtgggctgctgcagccagtcgcgataagtgacgcgcgcggccagtgcagccttgagcaacgtcgggtcgattaccacgttctgcgccagcagccgcaggtggctgtcggtgagttgcttgagttcgtcgcgaccgttggccaggtaatgggaagggcggcgctgggcgatcatcaacgacaacacctcacgtaatgccaagccccgtgccgccaggctggccggtgtggtggcggtatcctgaagcgcgcggttgacctgggcgaaatcggcgccgtaccacacccgcaacccttcggccatgccatgcacttcgccgtggcccggcacggccgacaggggcacgctgttgaggtaatcacgcactatgttgcgccgcgccgcaagcgtatcggggccatgctggtaagcgcgcacgctggcggagagcatctggcggattttctcgctgcccgacagggtcaggccgtcgggcgagtggcggtacttttccagctgggtggccagggtgctgccgcctgccgcttgccccggcaggtgcaactggcgcgccacttgcgaccaagcagctttggcgaagcgcggccagtccacggcggggttggcttgcgccggttcgggatcgagcagtgcacggttttcgataaacagcaggctgtggatcatcagcggcggaatgtcatcgaagcgggcgtacagctgggtcgggtagttgaattgatacagcggcgccgcgcggcaatcggttatggtcaagccggcctggatcttctcagcgtaggggataaacaagccgtgacggctgtagtccattaacgccttggaaaagcgcgcctgggactcgatcatgtagttgcgcttgagcaaacgcggcaggaactcgcccagtgcgctgtagcccaggcgctgatcgaaggggcccgcgccggggtacaccagtgcatcgctggcgccgggggccacccggtaggtcagcttcgccgcccactcgctgaatatacgagcctgccagcgtgaggtctgcgcctcccggtgcgcggcgaaacccagagcgatcaaggccatcaacgcaatcaaccagcccacgcgacgccagggtctggtttttttcggcaaaggcgctggtgacgggctgtcggggtcgaggtcagcctgggggggatcagtgtgctgcagagcgcccatagtcgattgatccattcctacagattgatcggacttgtctgaagcgtagacgcagtttgtcggtcaggaggggacaaatccaaatgtaggagcgagcttgctcgcgaaaaccgtcaacgataacgagtgcttcctgaatgagcgcggcgcctgtgagtttttcgcgagcaagctcgctcctacgaagggcaggcatttggggttgccccaagcagcgctaactgtttacagccgccagttctgcaccagccagtagcgtctgcggtttaaccgcataccgagcccctcatgacacctcccgatacctcagcagactcaccccgccaaaccaccctcgagcaaatcgaaaccctgtttggcgaaccgccctcattgccgttagtcgcgcaagacagcgcccaggcttacttggaccagcacctgggtaccggcatatggcaagccggcctgatctacatcggcaccgccaatgacagcgacggcacgctggcttaccagtccctggccgaacgtgtggtgcagcggctcgccagcgcgaaacccacgctgctggtgccggactttcataaggtcgtgcagcggcgtcgagagatcttcgagccgggcgggccgacccttgcgcaactcgagccgctgatcaaccgctgcggcgcgctcttgctcggcgcctatgcgcaacgcctgcaagcctggtggcgtgaagcattgccggtggacatgacgcgctggggttacctctcggacgacctgctggccttgctctacgactcacccaaaccccctggcctgagcgaggcgcaatttgccacgctgttccccaggcacctgctgcaccctgtgcggccggatcgacaatggaatgctcatggtgacgccctgcgcgttcgtgccctgtaccagccaggccgggatgggccgcagatgctgcccgtgctggtgctcagccatgggcaacaaaccctgatgttcagccccgccagtggtatccacccgctagcccgcctggacgacgtcgccgcgctattaccggcctatggtgcggtaggccaatggtttgcccaggacgttgagggcgatcccttcgacgccctggcggccagttacctggcgcagcagttacgcgacatcgacagcatcgaccgccaccaacccctgttgccggggcagcaccagaggctgttggaccatatcaccgacccacgtcgctggttcgttgccagcctggctcccttgcaacagaccctgcgcagcgcaatgccaaactggcttgtccaggccgacgataccgacagcatcgcctatgcgcgcctgctccagaacctggtgctggcccgccagcgcagcaacggccagcactttctggacggcattggctcgatccggcagtttgccgacaacgccttgcaaacctgtctgcgcactgagcccgctgcccagaagctgcgcgcgcaagatatccaactgacattcaatcgggtcgttgccgccgccgtcccggtgccgggaggctttatcgccggggaagtagacccggtcaccctgaccttgaccgagttggccctggaaaacctggccggcgttccccacaccgccagcgacatcactctcaagggcgccaaagctcccaagtggctgacctacagcctgctccaacgctgtgtgaccaaggccgacgtgggccaggcctacccggacatgctgaaggaaaagctgctggatgacccgcaagagtcggcgcgccgtttgcagttgttccaggcccagttgcgggttcaactgccgatgctggcgctggcgttgaagatcaaggccgaacagggcctgaccgaagccggctttcaatgtgtgcacgccgcgttgcaagcctcggctgctgaacgcaaggtgcaaggccaggccatggccgtgtggccgctggcgttcaaggccgcgcccggtgcggtgacggacgaggtgaccaaccagttcatcatcgggcctcgggataagagcgttggcgtacacctgttgtaccgacctttgctgacgccgacgttgcaggcgtttacctccatcgaggcactgcttgacgcgatcaaggcctcgggtgccttgcaggagcaggtactggcgtggctggccccggctcggcaagcggtgtatgcccacggtggttttaacgaaccgcatatccgccatttcctgcctggcgatgaattcaccgcctatgaaaaacctgcaccggtgcaactcagcaagcaactgagcaccgaggatcccgccagcctgattttccacggcaccgccagggcactggtggcactggccgaccggcaatcggtgtcgaatgtcgagcaacgctgggcccagttgaagcaggccggctggttgctgttcggtgccgtgctgccgtttgccggcgagccattgatgcttggcgggtggctgctgcaactggtggagagcttgcagaacgatatccagcgcctggccagcgacgatccgcaggccaagagcgcggcggtgatggatgtgttgaccaacctcatggtgatcctcgcgcatcaggcgacgccccacgacactctttggcctctgcagttggaggcgccggtgtttgcctcgctggcgcggcctgaacccagcccgccggtgccgacgcaggtgccagcgcccatgcgcttcaccgcgccgaccggctgggccaacgctcgtggcaatctgaatgccgcacagatcgcacgggcgcgcggcctcagtctccgggctttctccggcttatgggccggggccgagcacagcggcccgcagcgtggcctgctgcgcgacacgtcgcacaccccggcgcagtggcaggcgctgatacgcgggcagctgtaccgcgttacggtcaaagccggtgcggtgcgggtagtcagcgccgatggcagcaccctggggccctggttgaaacccttgggcgaagggcaatgggatttcgatgggcagttgcgtctggcgggcggcaatgccgacgccgccgtcgacgccaagttgaaggccggcgaggcgtcgctgtcgagcctggagcagcaataccgcgaggcaggtcgcaggcgggcaagggccaacgcgacgatggaagtggcacgccatctggcgcgggagacaaccagcaagatcagcgaggagcaacgggccacgttgcgcgagcgttaccgcaaggaactgcaaaacaaggtgcaatgttcccaagaggaactgcaattgctgatgcgcatgcgtgaaatcaagccacgcccccattatgagcaggagctgtgtgaagtccttgagtcgctgattttgagcctgcgtttgctggatgtgcacatgcgtgaacagatggcgcagatcaatgatcgcatcaagccgctgctggaggtgctggagaacgagagcgaagacgaagccggctccgacctcaaccgtcaggcccacgccgaccttgacctgcgcatgcgtgaacaggtcgacgccgaagagtctgccatccattggcgtaccctggagcgcacctacctggaccaactgcaagcggtgccacgcctggggcgtaacaaggcgcgtgcgctggcggcggatgtaccggcgcgcccatcgatcctcgacctgcaagccttgcaactgatcaccttgtggggcatcaccatcaatctcgagggcccgcccttggaggaagagtttttcgacagctttaaccaagtgatcaatcgtgcccgctgggccagtcgctccctggccgagctggaaaacatgtccgccacccgtgaagagcgggtcgaactgctcaagagcttcagccatgtctatgccacgaccgatgaccatattcatttctggcgcgccatggccccggacaccttcgacttggccaatctggaaaaacttcaaggcttgctggccagcctgcaccagcatgtggagcaagcgctggccgatctgctcgcaccgccaccaggcaccaggccggctaagccagcccagccgacgggtgcacgacagaaaaagatcattcgtacccgcaaccgtgatgtgtacgtcgcccgtatcaaggcgccgacccaggtcggcgacaccggcacggcggaactggtggataacaaaggcactgtgattgccaccttcaccgaggcgcaggacggtgtatgggaaccgctggaaccgccggccaggccgcgtgtggccaacccgcaattgggggcgttgatgaacaaggggcaacgcttgctggcagatgtcgacaaggccatcgacaacgtgcaggccatgaccggcaagtgtgagccgcagtcgctgcaggccttgctcgtggcgcaggccaacagccggcggatgctcgctgccgatatcgacagcaaactgcgccagctggacgtgtcgaggttggcggcgacgcaacaggccaacgcccgtgtccgggccagcgaccttcgggcggcggcgatgcgcctggatgcagccggcgtacaggcgcgcgtgcacgccagcaagctcaagttgggcagcgcggaagatgtggattttttgcacacactcaacgaggtgcgcattgtgaggcagggtgcacgcgtgccgatcaaaggcaagtcacgggacttcttgcaggtgtacgccgtcgtggacacgcacaccgggcaggcgctgtgttacgcgcattttcactacgacagccgcgtagggccggacgaccactacaaagacaatgccgcccacctcaagagccccgagcaggaacgaatggggcgccaggcccaggccgaggtggaggcgcaggcgttcgcgcgcatccgcaccggccagaccgggcgcgtgcgacaaaccctggaaatcgagcgtgcaagcatttcccgacgcctggcccggcgcctgtttttcagcgtggactgaggcgcgctggataagcctgggttttgaaagttatgtaatactctgcgccgttttgccctggcagggccggtctagacagcgggagcccgatccgtcgaagccgatttttccggggcttatcgccaaattttgctgtttattgagtgaaaagccctatcggtagctttttatactgcacgccccgctgtcctggccgagcattcgcgccaggcgggtttgcccacgaggcaggcccggtccggccggtgtatgagcccaccggctgatacgcctgagactcggtggctaaatccaataacaaaatgaggttgtatccctatgcctgttggcaaaccactgccccctggcgagaccgctcaaggcggcccgctcaaacgtgaactgggcgagcgccacattcgcttgatggccctgggcgcctgtatcggtgtaggcctgtttctgggctcggccaaggccatcgaaatggccggcccggccatcatgctctcgtacatcattggcggcctggcgatcctggtgatcatgcgcgccctcggtgaaatggcggtgcacaaccccgtagccggttcgttcagtcgttatgcccaggactacctgggccccttggctggctttctcaccggctggaactactggttcctgtggctggtgacctgcgtcgcggaaatcaccgccgtggcggtgtacatgggcgtgtggttccccgacacgccgcgctggatctgggccctggcggcgctgatcagcatgggcaccatcaacctcatcgcagtcaaggcgttcggtgagttcgagttctggttcgcgttgatcaagatcgtcaccatcattgcgatggtgatcggcggcgtaggcatcatcgccttcggcttcggcaatgacggcgtggcactgggcatttccaacctctggacccacggcggcttcatgcccaacggcgtgcagggcgtgttgatgtcgttgcagatggtgatgttcgcctacctgggcgtggagatgatcggcctcaccgccggtgaagcgcgcaacccgcagaagaccattcccagtgccatcggctcggtgttctggcgcatcctgctgttctatgtgggcgcgttgttcgtgatcctgtcgatctacccatggaatgaaatcggcacccagggtagcccgttcgtgatgaccttcgagcgcctgggcatcaagaccgctgcgggcattatcaacttcgtggtgatcaccgccgcgttgtcgtcctgcaacggcggcatcttcagcaccgggcgcatgctctacagcctggcgcagaacggccaggcgccggcgacgttcggcaccacctccagtaacggcgtgccacgcaaagcgttgctgttgtcgatctttgccttgttgctgggcgtactgctcaactacctggtgccggaccaggtgttcgtgtgggtgacctccatcgccaccttcggcgcgatctggacctggctgatgatcctgctggctcagctcaaattccgcaaaggcctgagcccggccgagcaagcgggcctcaagtaccgcatgtggctgtacccagtcagctcctacctggcgctggcgttcctggtgctggtggtgggcctgatggcgtacttccccgagacccgtgtggcgctgtatgtagggcctgcgtttctggtgttgttgaccgtgttgtactacgcgttcaagttgcagcccgccgtcgccaacagcggcgcgagccgctccgtctaaatgtgggagcgggcttgcctgtgatagcggcagttcagtcatagattcagtggctgacacaccgccttcgcgggcaagcccgctcccacaggtgatcggtgccaggcgttgatcctgtgggccatacataaccagtgtgggagctggcttgcctgcgaatgtggtggttcagttaaagattcagtgactgacacaccgctatcgcgggcaagcccgctcctacaggaagacaggcggtttcggccttcaggaggttgtttttgcggcctgcacagccagggtcagttggcgtaccagccgcgccaactcgtctttttcttcatcgatgatggcttggcgacgctccagataaaggtccgagcgtcggtccgactcttcccgattcaacctctcgatcttatggcgcgtcgtggcgctgatcgttgcaaagggctcgggtaaatggcgggccatgaactcgatccagaacggctcggtcatcagcgcgttgattgccgcatcgctggcctttagccgttgcagcttctggcgtgcgcggcgtatgtcctgtggcttcacccatcgctctgctgagtacagcatctcctcaggcccgatcggcaagttgaattcctcggccagggcgatgcgtaggtgtagtttgacttccacatcgtccggttcttttccggcggcacgcagcgccaatatgtgctcgtcggcgaattgatccagctcacgcaagaaaaacacgcggttggccaaatccatcaaatcacgactggcttgcagcgtggcgggctgcaccttggcgatgtggcgcaggtgggtgatttccatgtcgatgaacgtcagcaacgcaccgtcgccgcaggtgccggccaaataggtgttaaggaagacttcgttacgcaactgcgtggagttgcccatcgcctccagcagcttccagaccctttcagtcaaggcggggcgtgccgatgtattgctgtaggcatacgcctgggtcaaatcccgcagtacccggaacgcatcatccgggctgggctcttcgatagacagcaattggtcccacagggtgcggcgctgcacatgttgctcaaccggtacgccactcagccaattggcaaagtctgcttcgcggggcggttggtgggtgatgcctggcagagggccacccagggcggcggtacggttggcgtgcgctccgatgcgggcgagggtctcggcatccagtgggttgtcatgcaactggatatccaggttcacctgaactctgcgtccgggctggaacagcgtgttcggcaaggtcgtcaggcggttttcctggagtaacaggcggttcaggacgggcctgtcgtcggctcccaagggccactggtcgatctgggtattgcgcaggttaaggatgcgcaactggtccatggcgctgacatccggtgccaggcccagagggttgtcgttcaggttcaattcgcgcagcgaggtcatttgcgccaggcgttggcgtgcgtctgcgtccagggtgatgtggttgccgcccaggttgagtacttccagatggcgcatctcggttatttgcgttggtaactcgctgagcaggcagtcgatgttcagttgacgcaggttggcaaagcggctgaggaaggcattgccggtcgccgggaatgtattgcccgagatgtgcaggtcttcgatgtgttcaaagcctcgagtgccgaggatgaaatcagcatcgggcagattgttgtcttccaattgcagatgtaagaaatggcgttggaagaaatcatagctgcgcgatctaggggtttcatggcgccaggcttggcggatatgctgggccaggtagcgccgccgccccaggttcaaccccataggatcggtggccgggtcgtcgatgggctgcagggtttcggcccagcgcgtcaggccgtggtccagggtggcgtattcggcttcgcggcgctccagttccagcagggtggcgggggccgacaagtccagtgattcgatcaatagctcggcctgttccacgctgaagctgggatagagtttttgtaccttacgcaccaggtccgcagtcctcgggccacggaacggccagaggttttgcagtgaaagtggataggccacgaatgagctgtccaccttcatcggcggttgcaaccatggcggtatcgcgggcaggtcgagcaaccgcttgatcgccacgcgttggttcagcgccaggtctgcaacgcgtgattgcagtgtggccaggtcgaaccgatcggccatgcccaacgctgtacattcgctgggtgacagcagcaggacaatggcgctcagcaggtcgccagtgctgtcggctggatcgttgagtgtgcggccttgcgggtcgagggcacgataacggccacccacccggatgagggcgcggcggtcggtgccggtgaggtgcccgccactttccagcaggcgcccggtgtcggtgtcctcgtggatgtccaggcgcaactgtgcaggccagccgttgagtgacttgagcatatgcaaggtaatggtgtcgctgtcggggttcatcagagtggtcaggtacaggccctcgtaggcgcggttcaagcgcaggtcgtgggcggtcaggcgcgcctgttcagccaggcgcaggccgacctggtttttgtcctgcagttggcgttgctccttgatcgtggcctggccgaggatggctcggacggcgctcacaggcagttgcggatgatgctgtttcaggcgcgtttccagcagcgtgccaggctgctcgctttgcgcgtagaactgctcgaacagttgggctctttcgcgataggcgtattcggcgatgcgtttggccagcttgaactggcgctcttcgacggtggcgggtagctcccccaacagtgcttgaaccaaggtgtcgttgagcgccgcatcgtaaatcggcgtggtgccacgcgcattgccttgggatacacgaatgatttgcacgggggccttgaccttggcggggtactggaccagcacctgattgcgtttatccaccacttgcaacgcatggctgtcgggccagccaggcagtaaactcaacagcatcaactgcagggtaggccgggcgttatggcgggccgatgcggtggtcatcgcctggatgaaatgcaaaatctgccgctcgatgcctacgcgcttggtggtgtcctccagcagcggcggaggcggcaggccggcactgtgcacctcgcgcagggctcgggccggcgtgtcggtaatggcgagtatgcgcgccgaggtgggctggtcgacatgggcgttttcaggcccgagacgatagagcaaacggtgatcatcccagctcatcgggtcttcgctcgccaagcgccaggcgccgtgccggttatgttcgagcagcggggtatcgacccccactttctgtgggtgcttgagtcgccatttgagccgttgttcgtcaaacgtgatcggatacaacgagccgtagaggctgatcagttgttgatcctgccacgcatagatgccctcggcattggcctggagttcagccggcaacaccagagattgttcgtattgacccagggagccgttgagcaggctgacatagccttcggggctgcgttgcgcgctcatcaggtcccccagggttttacgcaagcccttggcgtcggtgtcggcattcatgcccaggcgggtgcgttcatggggttgcaacaccgaaccgattgccaggtagaaactgtcgatggccggcgacaccgcaatggagccggcattgcgcatgtcgtacgcctcgtagcggccctcgccgtaatgcagcagctccacggtggtgtcgtccgggctgctggagacatagcgattgggcggcgtgccattgaccatttcggtcactacgaagtggcggttgaaccacttgcgcagcaggcttgaggcgaactccctggcccattgatcgttgtccgggttgaacgggcgtgggtggtacaggccgtcgatggcggcgtcgatgcgcaaggcagtgcggtgttgttccagcagttgccgggtcgcggtgggcaggctggcgtcgtgcaggaaacgtgtttgttgcgatggggtgagcggttggtgttccagcagttgcgcaacgttggccggggtgagcggtgggtacagctcatggagtttgcgcagcagcggcgtgacgattaccaacggctgcgccaccttgataggtagcaagtcgcgcgccgcttggcccactggcacttcatgcctggcatagccggcataacgagtcagggcctggaacaggtccaggcgtcgtgtctggaccagggcgctgatctgcacgcgcaggcgcgcagtgcgctgggcggtagtcaaatgcgggctgccagctttgcccagtacggagcccggtggttgctggcgcaggatcagtccaagcagttgctcatcggtatcagggcgcccatcgaggccggtgtaagtgccatcgtcacggcgcttgaggctgatgagtgtggtcgccggggcgtgctgttcaatggcgccgtaggtttcgctcaacgagccgtcggcagtgtgcacgttgatcaatgcgccggtcggccattccggcaattgggtcagcaggcacaacaccgcgccgtcggcgtggggcggcatgtgtccgcggcgatggaactgcgtgatgagctgctcgatcacccggtcggcttgcaaccggcgcaccccttcgacgaggttgaccggcgtggcttggccctgccagatggcatccagggtgctgcgcgtggtggctgtgctgcgcagcaaagtctccatggcttgagcgggcacggcggtcgagccgttgggcaacatgcgttcggccaactgtacgttgctcagggtgtgtgcgttgttcaagtccagcgtccacgcgcccaagtgtgggtcgtacacgatgggcggtgcgaagccgccgcgatgatcattcttgagtacgaagcgcatgaggctgctgtcgtagccaacctccaccacatgtttttgctcggtgtgccgcagccatgcgtagtgtttttcccgcagcgaatagatgccttgggtgttggctacctggccgtcgagtaggtgctgatcgaggattgcataggggctgatatccggtttccacagcgtgtgagtgccatcgctgcgtatcactttgcgcgggttgcccagatggtcgagcagtgcgttcatgcgccggcgatgaatgctgccggcggtggaagtcagcaggccgttgactgccaggtcggcgacatcccccatggccgcggcaaagttggcggcctcacccttgagcgcttcgttcacgccttggatgatgctgtggcccaggctaccgaacactgccacctgcatgatcctggtcatgccggtcacgcctcccggcacgggggtaagcaatagctccaggacttcggcggcaatggctgcggcgccatcaatcacagcttgcacgtcccggtctgcgcggctttgagccagtgtcgccaggttggcctggaactgctgaaccagcgacccggtcaaggtgtttaccagcgaagcgtggcgtgagcgcttgggcaatgcactgaagcgcaggtcgctcagggtgctttccgggaacaggtaatggaggctgtcgtacaggaaagaagcggcggcagacaagcctggcgggcgctgttcctcgtggagcaggcgcttgaattcgttgagttcaaccagcggtaactggcgagcaaaccatcccaggtcgtgcttgcgatgactgtctttgagttgcgccacaaactgcgcattggcgctgctcgcatcggggtgataacgcagggctccctcggggcggaaggggaaataggaaaccacccccaggctgcccacgggaatcagcaacagcggcagcggcacagcggtggcgggtggtgcaagggtcacctctggaaatatgcctgagggtttgctcatcgccattcgttcgattgagggatagggctcgtcgctgtcgatggcctgggtcagcgtctggtaaagggccagggtcaggccgctgctgctgcggtttcgatacgcctcaagggcctcgaaacgcaggcaggcgcgtgcgctggtgcgcagcaaggtgtacaggctgccaccgctgcccagttgcgcggtgagcacgccttgcagttcgcctcccaggtccagctcgcgggtgatctggacgaaggtttcgacagtcaggcttgggtcgtcattgccggaaaggtaggtggcatcgacgaaggtatgcccggaggtctgaggcgtctgggtggcgtagccgaagttcaggcaggcggcctcccacagggacattgtcgatagatgaggacggtatttccattcgtcataggcgcggcgaaagcgcccctggcgctgatcgttgacgttactgctgcgtggttcccacggcaggggcggggtgaccggctccaagtagcgggtgtgcagcaagaccttttccgggtcctggccgccgagcttttcgcgcaggcgtgccaggccctgagtcttgaaggtattgatcaacgcggtgtttgcgttgtcaaccgccgtcaatgcggcgtgcgcctcgcgttgcagccttaggtacgttcgttgttgttccggggtgaggctggccaggctttgagtgacggtctggcggatcatctccagggcttgttgccggttccaggactcgctgtcttgcaggttgccggataagccgttgaggcgtaactgagtgggcatggcgccatttcctttgactgtagggtgcaaaggcaaatggaaccatcccggtgtccggcggcgtcgctaactatgtagtcgcgacgacggcgcggttggcgtagcgttggtccaggcgcttgttcaggtccagccaggcggccaatacgcccatcaacacagcaccggccaaggcggtggataacttgatcgccacgctgtcgccccccatggcattgagcatgtcggccaatggcgccagcaccacgcccaggcaaaacacctccagagagtaacgccccatccgcgccagttgcagggccagccactgctttgtccagccgacgtcggggagcaatttggcggtcacgtaggccagggccaggaagtgcagcaggcgcaccggcgacaggtcggttttactgatggggtacagccatccgccaatgacgcgtggcatccaggcgtcatgcacctcgggccagcgccacgacagggtgatcacacaggtcaccaacacgtagagcgcagcggccacaaacaagggttggcgcagcaacggccgcgcttcggccgggctgggtgagcgcaacgcggctgcgccgccgaggatgaacaagcattgccaggtgatggggttgaagtaccacaccccgccgttgctcgcgggcaaattccagccctgccagggcgccagcaggtacaccgccaccgagatcgccaccatcacgttgggcacatacaccagcagcggcagggtgagcggcaggctcagaatcagcacgatgtacaagggcaacgggtcggtgaggttgggcttgaagcgcagcagcagttcatcctgcaaggcctgctgggtattggtgaggaaatattccaggcccatctcctgcaccaggtcgcgggtctcgatatggctgttggcgaaaatcacgatgcccatcaacagcgccaacaggaaaatatgcgccacgtagagcgtccacacccgacgcaggattttcaggcaggcgaagagatagccatcgcgctgcagaatcttgccgtaagccagcacggctgcgtagccggccagaaacacgaagatttctgcggcgtcactgaacccgaagttctgcacggtgacattggccaaggggttgtggggcacgtgatcccagaaaatgaagatcaacgccaggccccgaaaaaaatcgatgcgcgggtcgcgtccgttcagcatggcagcgggctcttgaacaagtagttgaatgacgataggtgcgcgcgggcgtcgccgcacgtcgggcgggcgcaggttggcggtatttgtaagcaattgcaaaggctgggtattgctgaatgtctcaattgggcttggggtacctgtcaaggttgacagtagacggcgtttggcagccgtggcttgcttggcgtagccgcacaggactgaagcatgactcgactctggaaaggattctccagctacacgctgattggtatcgccaatacggtgatccattggcagctgtttttcatgttccggacagggtttgagttgaatcaggcgctgagtaatttgctggcgttctgtgtggcagcgtcgttctcgttttacatcaatgccctctttacgtttgatagccccgtttccttgggccgctacttgctgttcatgacctgcatgggcggcttgagcctggctgtgggatggttgggcgaccatctgcgtatgccagggattgtcaccgtgctggtgttttcgctggtcagcctggtgtgcggttttttgctgtcgcactgtgtggtgtttcgcgagcgtggacaatgaaaatctcgctggtggtgccactgttcaacgaggaacaaacggtgcgcgttttactgcgcacgcaatgggccacgcccgcataaactcgccgctgactggccaggctcatatgttttgaggcggtagtcttcaagtcgcttcgctatttctcgcctgtaaacaaataatcgacaaccgctcggcagcccagttgggcaacgccggtgggacagactgccccgcaataggcaaccggcgcgtatcgctcacctcgaaatgcgcctggttggtagtcgtcgaatccggccccacgaagacggtaaaaccgccggcctcgaccttcggcgagaaatgctcgtcgagtaaggcaaagtcctgttggcccagggaaaagctcacgctgcggctttcgcccggtgctaaatgaattttgcgaaaaccccgtaatcggcgcactggtcgagtgacgctggcaacatcatcgcgcaggtacaactggacgatttcatcaccggcgcgtttgcccgtattggtgacggtgacttcaacctccagcgtctgggtggaggtcagtcgagggctactcaggcgaggagaggagtagacgaacgaggtgtagctcaggccgaagccaaatggatacagggggggccagggcacatcaatgtaggcggatgcgtaactgccatcaccgctgggtgggcggccggtatttttatgcgcgtagtaaatcggtatctggcccacatgacgtgggaacgtcattggcagcttgccgctggggtttacgtcaccaaagagcacatcggccacggcattcccggtctcgctgcccaggaaccaggtttcgagtaaggcgggcgcttgttggactgactcatcgagcaccagcgggcggccgttcatcaggacgatgaccagcggctttcctgtgttcagtagtgtgcttagcagcgcattctgcccacccggcaggccaagttcggcgcgactatgggcttcgccgctctgttctgcggtttctccgagcacggcgatgagcaggtcgctttcacgcgcagtacgttcgacctgcttgatatcttggatatgcgggctgctgggcgaggcgccgggcaggtaaacaatctcggtgccaggtgcgactgcattgcgcagaccttgcagcacagtgacggactcttcggcgcgtccggccccggcccatgggccgatcgtggcgctggcgtccgaggcgaggctgccgacaaccaagaccttgcccggctgtttggaaagcggcagcaatgtgccgctgtttttcagtaagacgatggatttctgcgccgcttctcgagccagggcgcggtgttggggcgtgagctggctggcccgctcgcgggcttcgtcgctgtaccgataggggtcatcgaacagccccaggcgttgcttagccgtgagtacgcgacgcacggcgtcgtccacagttttgcgcgatacctgaccgttgcgcaccagcgtcggcaggtgttggcgataggattgactggccatctcgatatccaccccggcagtgaacgccagccgtgcggtgtcggccgccgtggcggcaatgccttgtgggcctagttcccagacagcattgaaatcactgaccagcaagccggtaaacccccattgtttgcgcaacagaccggtcagcagggcggtatggcggtgcatgggaatgccggccacctcgttgaaggacggcatgattgcatcgacgccggctgcgacggcggcctggaagggaggtaagtacacttctctcaaggtacgttccgacaggtcggcaacgttatagtctcgaccgccttcggcagcgccgtaggccacgaaatgttttgccgtcgcgagcatcgacgagacgtcaggggcacctgcgccctgaaagccatgcacgagggcagcggccagtgcagaacccagaaacggatcttcacctgcgccttccaccacgcgtccccaacgcgggtcacgggtaacgtcgaccatgggcgcaaaggtccaatgcacgccactggcggtggcttctacggctgccgcgcgtgcggttcgttgtgccaggtccgggtcccacgctgaggcttgcgccaagggcactggaaacaccgtccgaaaaccatgcaacacgtcataggcgaataacaagggaatatgcaggcgagagccgttgactacctgttcttgcaactggcgggtctgttgcgcggtactcgcccccagtaccgaccccaccagggtgacgggcatctgtgtttgcgtgccttgatcaatgacggggccggtgggcgtagtctggatgccaagttggctgagctgaccaattttttcttcaagggtcatttgcgccagcaagcgttcaaccggatcgtcctgggctagcgccagtagcgggaggcaggcgagcagcaatgaagcaaaatgtagaggcatggttcacccgtccatgggtagggttgatgccttcaagtgttttgcatcagagcaaaatcatctactgtcagaattgacagtgcgcgcccgtttcagacaggcggggtattctcagaaagcctccatcagcaagaccctgcacggtttggcctgatacgcattgatctgcggtaccaaacgggtgaagtgctcggtctggcaatgcgcatccagcgctgcttgatcgggccactgttcgataaagacgaagtgcccagggtctttttgatcgacaaacaaatcgtaggcgatgcacagcggttcctggcgggttttttccaccagttcggcgtaccacgggcgcacggtttcaagatgttcgggcttgataaaatcttcagcgatgactttcaacatgctaggtgtccttcaggccgctgcgatttcatggggctcaaaactatccgcccgcgccatctgccacatccgcgaataaaactcgccgttcacttccccagtgagcaactcgccgggcttcaagaacacatgcagctgtgaaaacagcttgatctcagtcgccgacatgcgccgtaccaagtgcttggccgacaattgcgatggatgctccagccctgcggcggcgagcatttctgccagggcgtgcagcgtgttgcggtggaagttgaacacgcgctgggccttgtccggcaccaccagggcgcgttgacgcagcgggtcttgagtcgccacgccggtcgggcatttgttggtgtggcatgactgagactgaatgcagccgatggcgaacatgaaaccacgtgccgagttggcccagtcggcgccgatggccaggacgctggcgatgtcgaaggcgctgacgatcttgccgctggcgccgagcttgatcttgtcgcgcaggttcaggcccaccagggtgttgtgcacgaacagcaggccctcgcgcagcggcacgccgatgtggtcggtgaactccaccggcgcggcgccggtgccgccttccttgccgtcgaccacgataaagtccggcaggatgccggtttcgagcatggccttggcaatgcccatgaattcccacgggtggcctaagcagaacttgaagcccaccggtttgccgccggacagttcacgcaactgggcgatgaactgcatcagctcgatcggcgtggaaaacgcgctgtgacgcgacggcgagatgcagtcttcacccatcatgatgccgcgagtttcggcgatttcctgggtgaccttgtgcttgggcagaatcccgccatggccaggtttggcgccttggctcatcttgatttcgatcatgcgcacttgcgggttctgggcctgcacggcgaagcgttcggggtcgaagcggccgtcgctggtgcggcagccgaagtagccgctgcccagttcccaagtgaggtcgccgccgtgttcccgatggtaggggctgatgctgccttcaccggtgtcgtgggcaaagttgccgagcttggcgccgtggttgagtgcgcggatcgcgttggcgctcaatgagccaaagctcatcgccgagatattgaacaccgacgccgagtacggctgcgtgcactgcgggccgccgaccatcacgcgaaagctgctggggtcgctcagtggcgcagggcgcatggaatggccgataaattcgaagcccgactggtacacgtcgatcagggtgccgaagggtttgtcggcggtttcgttcttggcgcgcgaatacaccagcgagcgctgggcgcgggagaagggcagggcgtcgctgtcggactccagcaggtactggcggatttccgggcggatggtttctaccaggtaacggatattgcccaggatcggatagttgcggcgcaccgcatgagggctttgcagcaggtcgacaatgccgatcaggctgagtacaccggtgactatcgtgataggccacagccattcatgttcgataaaggggaggctggcgagggtgaaaatgacacacacagcgaagaaggcgtagcggcttaacaaggacaggctcatacagtttccttgggttcggactcttcaggtcgatcacccattctgcacctgtcgataaagcacggacaaggattgatcgccctgtcgcttttttgtgcttcggcgtctttgtacagacaaaaatatctatcagcttgatagaggaacttattacgcccccgtcaccattcattgggcgtctggttatgaccgggcaatggaaagtaaggacacttttatcaagacggaatttataacggcaagagtgagtaacttacctatgacggcatcgataacgacagcgaatattttttccaatgtctggagttctgcgccttccagtgacgacgggggtaaaagccagttaaccggctcgcagcgcgagcagatcgcccaagaacataaaagaatggagggtattgaaaaacctgagcaggatgtgagtcgaaagccggagttggctactggccgtccaccaggtgataaccgtaccgccgagcaaattatcaacgacaacccgatcctcaaaaacctcggtcatcagaaagatatcaatcgcccattggcttataagcttctgggggattggacgagcaataacaaagacccgcaggcacgagcggacgccgccttcaacgcggcgcgggtacttaactatatcgatacgtccttatcggctgacggcaaacaccgaggcaaggcccatggcaatggcgatcttgaaggcattacccgtagcggcgatgcccggcacggtacgccggctggtatgtggaaagactttacggagcagggttattcagccttgcgtgagcatcaccgtctggatagtaccagcgacacccatgtaaaggcggatggcaccaacaaagataatctgcagtgggcttccggcgaagctggaaagagaacctggtttattcctgggctcagcaatattcttctgggcatcggcgatgcagaccaggggttggtcggggccctcaagggggccaaggatggttttgacaaaacccgggccgatggttttgatcaggcgctcgagagtgctgcgcagggggatatctggggcgtcttaaaagggtatgccagtgctgtgaaaaaaaatgaggccacgccagagctggtcaagacagtgttgaataaggcgggcagctaagatcggaggggagacaggtttggttcttggaaagggatttccagaaagccccataaggccataaatatctatagaagatctcggcccgtcaggtaggcatgagtaggctgccccgccttcgcgagcaagcccgctcccacagtttgatcgcggagcgtgacgcaatacctaggggcatagatcggcgcaatctattcttattgcaataggttctcgtttggttgtttgattttgtgttactgtataacaaatcaactgcgcccaaacgccccggaggcctcatgaaagctggtatccaccccgactaccgcaccgtgctgttccacgacactgccgccgacgtgttcttcctcatcggttccaccgccgacagtgatcgcacccataaacacagcgacggcaacacctatccctacataccgctggacgtctccagcgcctcgcacccggtctacaccggccagcagcgcaagacccaggccgaaggtcggattgccgggttcaacaagcgttttgcatcgtttgggtcgagcccgaaaaaagctgacgcatgagcatgatccggcggcgtgtcctacgccgccgtctgccgaatcggcagtaccacccgaaacttcgtacccttgcccagctcgctgctgacgctgatatcgccgcggtgttttttgacgatcccgtaggacaacgacaaccccaaccccgtaccttcgcccaccggcttggtggtaaagaacgggtcgaagattttctgcacggtctcgggggcaatcccacagccgttgtctgcgacttccagccagacgttttcgccttccactccgttgctgatggtaatggtgccgcgctcagggcccatggcttgtgcggcgttgatcaccaggttcatcaccacctgattgagctgggaggccaggcattcgatttccggcagcgacgcgtagtgcttgaccacatcggccttgtacttgagttcgctggcgacgatgttcagcgtcgaatcgatgccttgctgcaggttggcaaattgccaggtctggtcgttatccacccgtgagaagttcttcaggtctttgacgatctgcaccacacggccgatgccgtccttggattcgcggatcaggatcggaatgtcgtccttgagaaaatccaggtccagctcgttgcgcaatgccgtgagcggttcgcgatgttctggcgccccgatgtgcgcttcgctgtgctggtaggcatcgagcatctgttgcagctgcttgaagtagctgtcgagggtgctgaggttggaggaaataaagcccaccgggttgttgatctcatgggcgacgccggccgcaagttgccccagcgaggcgagtttttccgactgcaccagttggctttccaggtgcttgcgctcttcaatttccagttgcagcgcttgggtgcgttcttccaccaaccgctccagctgcgaggtttgcagggaagcgcggcgggccatgtcccatttgttggccagggtgttggccatttgctggacttcgatgttgtcgaagggttttttcaggatcagcaggcggtcgtgggcgtgcaggcgaaacaacaggtcatcccaggaatagtccgagtaggcggtacacaccaccacttgcaggtcgggggcgactttccacagttcttcaatggtcttggcgccgtcccaaccctggggcatgcgcatgtcaacgaaggccaacgcataggggcgctgttgcgccatggcgctggtcagcaagcccaggccttcctcgccgccgtaagcgccgtgcagctcgaatgcctgggcttgaggtttggcggcgtcgccaaacagtgccgactccatctcatccagcgcttcggttgaggcttcgtcgggcatcaggatcttgcgaaaatcctcatgaatggacggtgtgtcatcgatcagcaggatgcgccggttgggaggttggttcatgagctgcttccggcaagggtcaaggggatggtcaaggtgaagacggcgccaaggcccggcccgtcgctgtgggcgctgagctggccgttcatttccacggcggccagggcgcagctgtgcaggccgaagccgtggccttccttgcgggtggtaaaaccgtgggtgaagatgcgtgccatgttctcgggcggtatgccttcgccatcgtccttcacactgatcttcagggtctcgtcgcctaccgattccaccgccagggtgatttgccgtggccgctcacacagtttgtccatggcgtatttggcattgctgatcaggttgaccatgatcagcagcagccggtgcttgtccgccaaaatctccggcaccggggcgtacgccttcacaacagtgacatggtgacggctcagcgcgccggcgttcatgcgcagggcgtcgtccatcaaggcgctgatattgaccggctccagcaaggtagacgcacccgcataggattgctgggtcgagacgatgtccttgatgtggtccacacttttgctcaactgcgccagctcatcgctcatgccttgctgttcgacagcaatcgcttcgaccaactggttcagatagcccggcagcaacttgcccttttcatcctcggtaaggaaggtgcccaggtcgccctgatgggcgttgatcaactgcatggccttgcccaggccgagcgccttgctggcgcgcaacttgcggctgaccagatcggcggagatattcacactgttgagcacgttaccgacgttgtgcaacacgttggtggcgatctctgccatgccggcctggcgggcgctgtccatcagctcgctctgggcatccttgagctgttgcgtgcgccgctccacgcgttgctccagggtttcgttggcggcctgcaacgcgcggttgacgcggtttatctcggcgaagctgcgcaacaggcgcaccgccaggtagagcagcagcaccacaagcaaggtcgagaagatcagcaggtagcgatggtattgatggtcgatgaggtctgtggcttgctggtcctgattgaggtgggtggtcaagtcatcgaggtgttcggccaccggcacggcggcaatccgctccagcaggctgttgaccagtggctgttcgcgcaggatcagcgaaatatgattgctgaggatctccaccggtgcctggaactcactgggcaggctttgttggttgatggccagtttgcccaggcccaccaggatatcggcggcacgttcgtcgctggtgacctgggcaaactccaggctgctgagcagcaggtcgtaagtgtcggtggccacgctttgcagctgcagccggccttcgtcggtcatgctgttgaattgggcctggatgtcgtcttcggccgtcggcaaaaaagccaatgagttacgcagcactgcgttgtgggatttgaactggtcgaccaaccgggctttttcctcgatggccctcagatacgccgcatggctggcttgccaaccgggcaggtcggctgcgctgtggtaggtgtcgcgactttccagttcagccccgatgcgggtcatttcggtcagcggtgtgaccagtgggtcgtagttgtgggtgatcgcgatcctggccttgagtacttcgctgtcccactgggcattgagctgctggagttggcggatcaagtcgcgcgactgggtataagtggccgtctggtcgcgtgaagacttgaggtacaaaaataccagggtggaggccagtaacagggtgatgaggcctagcaggatctggctgatacgtcggcgtgacaagcgtctcatagcggtttgcccgcccattcgccggtcagggtcttgagaaactggataatcaggtccttgtcttcctgggacgggttgcgccccaactggtacttgaacatcacgtcaaccgcctcctcaagcgtcctggccgaggcgtcgtggaagtacggcgccgtgacggccacattgcgcaggctgggcaccttgaatacatggcggtcctcttcatcctgggtcagcaggtagcgccccaggtccgattccagcgggttgccgcgggccttgaagtagtcgcccatcacaccgaacttctggaacatattgccgccaatgttcacgccctggtgacaggcgatgcagccgtaatccttgaagcgttggtagccgtatttttcctggcgggtcaggatatcggtgtcgcccagcacgtattggtcaaaccgcgagttgggtgtcagcagcgtgcgttcgtaggtggccagggcgttttgcacattggaagcggtgacgccatcggggtaggcctgtttgaacgcgttctggtaggcgggcagggcggagaggttgcgcaccacggtattccagtcgctgcccatttccaccgggctgatcaccacctgctcgacctgggcctgcaacgtgtccacccgaccgttccagaactgtttgaaattaaggctggcgttgaacacagaaggggtattgatctgcaccggcttgccgtcaaagccaatggagaacggcttgttgtcggcgccgccgctggtcagtgggtgacagctggcgcaggacaaggtgttgttgaccgacaagcgcggctcattgaacagctggcgacccagctcaaccttggccgggtccagtacgggaaccgccggcaagggcttgagcgcttcgttcagtggcgcggctgcgagcgatgtagtgcccaggcataacgcgaacatcaggccagaacggtggtttacgacgttgctcaagcgagcactccttgcaggcctagggctatttattttattgatcgggcatcagtgtcgcgctatccgtttgcagcaactgcacaaaatctttcgaaggcagcgccttgctgaatagaaagccctggccctcttcacactgctgggctttgaggaaattcagttggtcgatggtttccacgccttcggcaatgatgttcagctccaggctcttgcccatgccgatgatagcgctgatcagctgttcgtcctggctattgatgcgcaggccgcgcacaaaggattggtcgatcttcagcacatcgatgggaaagcgccgcaggtagctgaggctggagtagccggtgccgaaatcgtccagagccaggcggatgcccatggccttgatcttttgcagggtctccacggtttcatcgacgttctgcatcagcacgctttcggtgatttccagttccagttgggtgggcggcaggcctgtttctttcaggatggcggccaggttgtcgacgaagtctcgttggcgaaagtcgatcgccgagatgttcaccgacatgcgcaggggtgccaggcccatctcgcaccaggcttgggcttgtgtgcaggcttggcgcagtacccactgagtcaggcgtacgatcaggccgctgtcttcggcgaccggaatgaactccgccgggctgacccaacctgactgcggtcgaaaccagcgtgtcagcgcttccgcgccgacgatgcgcccggattccagcgccagcttgggctggtaatgcagcacaaactcatcgcggtccagcgcctggcggatcgcgctttccaggttttgctggtgctgggcgcgcaggttcatgtcttcggtgtaaaagctgaaatcccccgagccgcgctctttgctggtacgcatcgcggtttcagcatgcttgagcaagcccacggcattgtcgctgtcatcggggtaaatgctgatgcccaggctggcgctcacactgaggtcatgccccgcgacatggcgagtcgcgctgacggcattgagtaccttttgcgcaatgtgctgggtttgctggggatgctggatatcgttgagcagcaccacgaactcgtcggagccgtaacgaaacaccgaatccgacgcccgcaccgccgccaccaggctcaggctcacctgcgccagcacctcgtcgcctgccggatagcccagggcgttgttgatgcgcttgaagcggtcgagccccagaaacatcaccgccagttgcgtgtcgtgcctgcggcccaaggcgatcgcctgggtcaggcggtcgcccagcaacgtgctgttgggcaactccgtcagggcgtcgtattgcaataagtgcgagaccttgagcagctcctgcacgcgttcctcgatggtgcgctccaggctgatcaccttcagggccgcgtcctgggccagttgccatttccaggtcagggcgctggccatctggcggatttccaggtggtcgaagggctttttcaggatcagcagttggtcgttgtatttcaggcgcgcttcgatggcctcgaaggaatagtcggaataggccgtgcaaagcgcgatttgcaagttggggtccgcctcccacaactgttcgatggtgtgcaggccgtcccagccagggggcatgcgcatgtcgataaacaccatggcgtagggcgagtgggcgtcgagggctttcttgaccagtgccaaggcttcctggccctggtaggcggagtccaggtcaaacgcctggcgcaccggtgcggtggtgccgaacagggcggactccagggtatcgagggagggctcgccatgctcgtcggcacagaggatcttgcgaaaatcctggtggatcgaagccgtgtcatccacgatcaggatgcgtcggttggcccggcccgattccgtcctcatggcgcactcggcacgtgcaaaaggcttgatggcatgataattccttccctggttctacaactgaacggggcgcaagcatgcagtgcagcatagttgagttcccttgatatcgacggccagttggcgtcaaatcaatcgcgctttgtattgcgcggattcaatttagcctaacttcgtttaatttgaaggcagagtcgccatggatgaacaactcgctacgaagtccgttgttttgctggtcgacgatgaagagtcgatccttaacagcctgcgccgcctgctgcgcggccagccctatgacgtggtattggccaccagcggcgcccaggcgctggagatcatggcgacccggcctatcgatctggtgatgagcgatgcgcgcatgcccggcatggacggcgccacgctgctggccgaggtccaccgcctgtatcccgccaccagccgcatcctgctcaccggctacgccgacctgaccaccatcatcaaggcgatcaacgacgggcagatccaccgctacatcagcaaaccctggaacgacgaggagttgcaactggtgttgcagcaaaccctcgagcatcaacggcttgaacgcttggcccgagaccagaccgaacagctcaagctgctcaacgccaccctggaaaaacgcgtggcggcgcgtaccgccgagttgcaacaaaccgccgacatgctcgacctggcctacgacgagctcaagcgcagctacgtgaccggcaccgaagtattctcgctgctggccaacctgcgcttgcccaaggacaaacagaccaaccgtgcgttgatcgagttgatccgcgtgtattgcgccgcccagtccatggacgaatccagcacccgtgacctgaccatggccgccgcgttgtacaacatcggcaagttgagctggaccgacagcatgatggttgcaccgtcagacaaactgcatagcaccgaccgtggcttgtaccgtgagtatccggggcagagcgagtcgttgctgatgaccctggagccgatgaaggatgcggcgcggatcattcgtcatcaccaggaacgttgggacggcacggggtttcccgaccacctcaagggcgataccatcccgcccggttcacggctgctgaagctggcggtggactttatcgaattgcagaaaggcttgatcctggagcgacacctcaacagcgacgaagcgctgttgtatatccgcaagtacgccgggcgcctgtatgacccggcgttggtggaagattttgtgcaggcctgcgccaccttcctcagcgacgtgaccctgggcgaccccacggtcaaagtcctcacgacccgtgagcttgaggccggcatggtgttggcccgtaacctcaatgccgataacggcatgctgctgctcaatgctggcaaggtgcttaacttgccgctggtggacaaattgatcgcgttcgaagcgatggaaggcgccaagtacagcgtatttatcaaacagcccgaagagacctcgattctttcatgaatgattcaaccatccgcatcgccgccgccatcctcattgaccaagccggccagaccctgctggtgcgcaagcgcggcacccaggcgttcatgcaacctggcggcaagatcgacgcaggcgaacaacccgtccaggcgctggcccgtgagctgtatgaagagctgaacctgcacatcaaggtcgaggacgccacgtacctcggccaattctcggcgcctgccgccaacgaaccgggcttcaccgtgcaggccgagctgttccaggtgcagatcgacgttgcggtcacgccagcggcggaaattgaagaaatccgctggatcgaccccacgggcgatggcggcctgcaattggcgccgctgacccgcgatacgatcctgccgctctaccgcgcgtcgctgatcgacgcatgatcattcgcccgctggaggctcccgacgcacccgtataccgggcgttgatgctacaggcgtatggcgcttatccccaggcgttcacctccagcgtggccgaacgtgccttgatgcccttgagctggtgggaaaagcgcctcggcagcccgctggaccggctgtttggcgccttcgacggcgatcagttggcgggtattgtcggccttgcatttgagcctcgggagaaggcccggcacaaggtgaccttgttcggcatgtacgtgaccgaggcttatcaacagcaggggcttgggcggcaactggtgcaagccgcactggaagaagcccgtcgccacccgcgcctcaaattgatccaactgaccgtcaccgccggcaatgacgccgcctttgcgctctaccagcgctgcggtttcattcagtacggcctggagccattggctgtgcgggtaggcgtggagtacttcgacaagatccacatgtggcgcgaactgcaggtggactgtgggagctggcttgcctgcgatagcatcaccacggtgtaactgaaacaccgcggtgcaagcatcgcgggcaagcccagctcccacgctagcccgcacactcagagcccgctcaacgcaccgcgctgacgccatccagcgtggaaaacgaggtgtccttggccgtcagcaagaagtcgcgcatgtaaggcgcatcgagcatgtcggcacgaatgcccgcatacaacgtggcgaacaaccctttctcgcccaaccgcttggccttcacatacccgcgcgagctgtattcatgcagcgcccagtggggcatgccgcacacaccacgaccactggccaccagttgcatcatcatcacggtcagctccgaggtccgaacctgggccggttcaacgtcggccggttccaggaagcgggtgaagatgtccaggcggtcacgttccaccgggtaggtgatcagggtttctgtcagcaggtcttccggcacgatgtaagacttgttcgccagcgcgtgctggttggccaccgccagcatggcttcgtaggtgaacagcggcacgtaggtgatgcccggcagttccagcgggtcggaggtcaccacaaggtccaggtcgccacgggccagggccggcagcggcgcgaaggcaaagccggaggccaggtccagctcgacttccggccaggcatcgcggaactgatcgatggtcggcatcagccactgaaaacagctgtggcattcgattgccatgtgcaagcgcccggcggtgcccccggccagccgagcaatatcgcgctcggcaccgcgcaacagcggcagggtggcgtcggccaattgcagcaggcgcaggccggcgctggtgaaacgcaccggtttggtcttgcgcacgaacagcggcatacccaggcgctcttccagctctttgaactggtgggagagggcggactgggtcaagtgcaggcgttcggcggcctccaccaggctgtcggcttcgcgcaaggcgtgcagggttttcaagtgacggatttcgagcacaggcgctccatgaagaaaatttgcgattaaaacggattgcttgattttgtctcatgttgtggagcgtgtcgaccatgaccactgggcgctcttcatcaaactgtcatcgaactgtggcagcgcgcttgaacaaacttcatcagactcgcgctctactggggttctgcgttttggtgtttttcatgcgtgcgttgttttttgtggccgctctactgttcggcctgccgtcctttgcggcttctcgatgtgatgtcaatgtcccgacccaaacggtcgacctggctcaggtgagcatcgcctatcaaagtatcggccgtgcgtccgaccctgcgttgctgttggtgatgggcctgggcgggcagttgattcactggccggatgaagtggtggtggccctgtgcgaacaaggtttccgggtgattcgctacgacaaccgcgatgtgggcttgtccacttggcggcaggcgccggcgagcgccaacctgactttcgaagtgctgcgctacaaactcggcctgccggtggccgcgccttataccttgactgatatggccgacgacgcgctggggttgatggatgcgctgcaggtgcagcaatttcacgtactcggcgcgagcatgggcggcatgatcgctcaacacctggcggccatggcgccacagcgtgtggaaagcctgaccctgatcatgaccagctccggcgccgagggcctgcccgcgccgaacgcggcgctggtgcaattgctgtcgcggcgcagcgcgcccaaccgtgaggtggcgctggagcaacaggcggatttgctcgcggcgttgggcagcccggatatcaaggacgatcgccaggcgttgctgcaccaggcggcgctgtcctatgaccgcgccttcaaccccgaaggcgtgaagcgccagatcatggcgatcctggccgagccgagccgtgtgcccttgctcaaccaactgcgcgtgcctgcgttggtcgtccacggcaccgccgaccccttgctgccggtgatgcacggcgtgcacctggccgcgcatatccagggcagccagttgaaattgattcccggcctggcccaccgttttcaggaagcgttcaaggcgcccttgttggcggcggtgttgccctacctgcaagcccatcgccaggatggcgcgcattgggcgcagatcgatttgagcgagccttcgaaggtgctgtgaaggtggtgtatcgtgcaacctttatgcgcatgactgcctgcgaggttgcccaccatgagtactcccctgaaaatcgatttcgtcagcgacgtatcctgcccctggtgcatcatcggcctgcgcggcttgaccgaagccctcgaccagctcggcagcgaggtgcaggccgagattcattttcaaccgttcgaactgaacccgaacatgcccgccgaaggtcagaacatcgtcgagcacattaccgaaaagtacggctccacggctgaagagtcccaggctaatcgtgcgcgtatccgtgacatgggcgccgcgttgggctttgcttttcgcaccgatggccagagccgtatctacaacaccttcgacgcgcaccgcctattgcattgggctgggttggaaggcttgcagtacaacctcaaggaagcgctgttcaaggcgtatttcagcgatggccaggacccttccgatcacgcgaccctggcgatcatcgccgagagcgtagggctggacactgcgcgcgccgccgagattcttgccagcgatgaatacgccgccgaagtccgtgagcaggaacagctgtgggtttcccgaggggtgagttcggtgccgaccattgtcttcaatgaccaatatgcggtgagcggtgggcaaccggctgaagccttcgtcggcgcgattcgccagatcatcaacgaatccaaatcctgaaaccgaacacggagcaaaatgtgggagctggcttgcctgcgatagcggactgtcagttgcaaatgggctggctgacacaccgttatcgcaggcaagccagctcccacacttgatactcattgtttgcaaaaatggcgctcatccaagcgctggcccatcccttgcattacccccctaaagcccaaccggcctgcggttgggcgctgccattaggggtgaaacttaccttgaacattcttgaccttgaccacagcctcaccggccaggcaccgattgcccggcggttggccagcggtcgggccacgcgcctggacctgctggacctgggcccgaaattgcgtttgtggtccaccgaaaaaacctggaaacgtttcgtcgagcgcctggcccagcggcctcggccccgtgacgcgcgcccggaaatcctgtttgttggctccggcgattatcaccaccttacgccggcctttttggccgacctcaaagagcccatcagcctgatccactttgacaaccaccccgactgggtgcgctttgcgcccaagcggcactgcggttcgtgggtcaaccgggcgctgaagatgccggcgatccaacgcatcgtcaccctcggcccgtgcagcgatgacctgcataacccgcaactgcgcggcggcaaccttggcgccctcaagcgcgggcgtttgcagttgtttccctggcagcatccgccgtccaaggtctggggccgggtgggggacggcgccggccaccagcaacaggaaaaccacctgcattggcgcaacttggcggacctggattgggcggctttcctcgaccagatgattgccagcctgcccaccgaagcgatctggatcaccatcgacaaagatgtgctggccagtgaagacgccgccaccaactgggaccagggcggcatgcgcctgacccatttgctccaggccctgcgggcgttggcggcgggtaaacgcatcattggcatcgacgtctgcggtgagttcgccacgccggcgttcagcaacgcgttcaagcgctgggaagccaagtctgatcagccgccaccggagcgctggagcccgcaagacttgcagcgtaatgctgcaaccaatgaagccttgatcgacctgtttgaggagctgttcccgtgaccctgaccgtggtgttgttactggcgttttccatcgtcctcgatgtgattggccagctgtgtttcaaattgggcgtggaccgtttgccgcaactcgatggcggttttcgcctgcgtgcgttctggggccaggtgttcaatgcgccgctgttgtgggccggcgtcggcgcctatgtgattgagttttttgtctggctcgaagcgctgtcccgtgcgcccttgagtctgctgtttccgctggcggcgttggcctattgcctggtggtgttggcgggcagggtggtgctcaaggaaaccgtcagccgacgtcgctggctgggcacgttggtgatcacgttgggtgtgatgttggtagcaatcgcggggaaccaggcatgacaacgcagacaatcaatactggctggctgcatgggcggcttggcaccctggtgctatgggcattgctgatcgccaccgaaagcgcagggcaattgttcaccaaggtggccggcgatcaattggggccgatggacttcagttggcaatggctggtggacgtggcgcgcaacccgggaattctggcggcgattgccagctatctcggggcgttttttgtgtggatgctgattctgcggcgtagcagtttgtccctggcgtttccgctgagttcgctggtgtttgtggccgtattgctgggttcttggctggggctgggcgagcacatcagcgcgttgcattgggtaggcgtggtggtgattatcggtggtatcgcccttttggctgagggcgaagaacactgaaaatagtgctatgaacgcaggcccaatgtgggagcgggcttgctcgcgaatgcggtggatcagttaaatattagctgactgacacactgctttagcgagcaagcccgctcccacattttgctcccgggtaattcagtcgaaggtgtagctgatcgccgtctgcacctggccctgattcacctggccagcctctttgacgatgctgctcttggccgccgaccccaccaggtgtacccagctggcactggtcagcagtgaccaatggggcgccagggggaaggaaaaactttgactcagcgtcacgttctgaaagccgccgctcgcgttatacggccgtaagcccgaggcgacagcttcgttgttgtctacgccgaaaaaggtattggtctggcgcgcatcggcaaaatgcgcaaccaggccgctgctgccgataatccctccacccaaggggtaacccagttcgccgccgattttacccagggcgccgctctgggaatgcccgccgcccacggcctggcccaattgcgcgtagacccgccagaaattggccggggcgtattggacgaaaccgcccacttccgccatgtccgacacgttgcgcaggccttgcaactcgccgttggaggtgcgccccgaaaggtagttgatataggggccagcggtaaggccgtgggtatccagggcgctccaggtgaggccgtcatcggtgctcaggctgacgtcaccccaatccaggtccaggtacggcacaggccgggtttcgtagcggctgccgctggggtcgtggggctgatagctgaggcccgcgcccacatcgcccgtgatgccctctgcccatgcggcactgcaaaggccccaccctccaagtaaaccggtgaatacagcagcagcgaacttggacatggggacgtttcctgaaggtgggcaggcgcgcatgaacgcgcaaaccggcgcgcctgcgcaagcactcatgttgtttgtagcaagctacaaaaattgtagctcctgcgacatatatcgctgcgcatttcgcgccaacccccagccctgcggggttttcgccagttggcacagtccctgctctatcccttggcaagcgcatacagcgcgctcctccaaggccctttacctaaaggaaaggcagatgatcaactggcatatcgtgtgtgacttcgacgggaccattacccccaccgatgtcatcgacaacgtcctccannnnnnnnnnnnnnnnnnnnnnnnnnnnnnnnnnnnnnnntcggcggtttgtccatgggggccgtgatgtcgatgtatgtggcgtccgaacacccagggcaagttgccgggttgctgatgtattccaccaccttgaagtacgacggctggagcatcaacaaactggcgtttctcacgcccttgctgatgaaaattccgttcggcgtacacatttgcagcttcgaagagaagccgccctacggcatcaagaacgagcgcctgcgggccatcgtcgagcggcagatgaaggaaggcgaaagcagcgaggcggggttgctgaccatggaaggcatcaccgtgcgcgagctgcaccgtatgaacgccgtggtcaggaagcgcatgccccagatcaaagtgccggcgctggtgctgcattccatcgaggacgacatcaccagccgctggaacgccgattacgtggagcgccacctcggcgggccggtgaccaagatcctgttggacaactgctaccacatgatcacggtcgatttgcagtaccgccgcgtgatcgagttgagtgccaggtttgtcgagcagcacgcagttctaaaatcaacgcaggcccctgtgggagctggcttgcctgcgatggcatcactcaggtctgcctgacgtacccaggcgcctgcatcgcaggcaagccagctcccacattggatcgagaaataagggcaatctgtgataaccacccaagcctacccgaccatccgggctatccagcgcgatgcctggaacgattgtttttccggtgccctggaggattgggactattacctggccgtggaaaacgccgcgatcgatgacttccagtggcgttacctggcggtctttgaggatcaaacgctggtggcggtggcggccgcgttcgtcacccattatcgcctcgacaccaccgtgtcgggggccggcaagcgcttgaccgagcgcctggagcggctgtggccgggggttttgcaactggcgttgtacgccatcggttcgccggtggctgaacgctgtgatgccggtgtcgccagccatgtgcccgaatcccagcgcccgttgctgttgcagcaattactggcggctgcgcgcagcgatgccgacgcgctcggtatcggcttgctggcggtcaaggatgcgcccaccaatgacccgcattgggcccagagctgcattgccgcaggttttcaaagcatgcccagcttgcccacgggggtgttgccgctgccttatggctcggtggatgcctacctggggtcgctgggcaaatccacgcgcaaggacctgcgccgcaaactgcgcgcaccagggccgcgggtcgagtggcggcgcaatatcgatgacgtgctgcccgaggtcatgcgcctatatgaagccacgcttgcgcgcgcagacttgcagttcgaacgcctgcccgccggttacttcacgggggtactcgaacacctgcatgagcgggcggtctgtgttctgtactgggtggacgagcgcctggtggcgttcaacctgatcctgctggatgagcatcggctggtggacaagttctttggtcatgaccttgagttcagccgcgagtacaacctgtacttccgtagctggttgaccaatgtcgactactgtattgaacactgtattccggtgtacgagtgcggccaggccgggtatgccagtaaactgcgcctggggtgcgagttcgagggcaacagcctgttcttccgccaccgcaaccggctggtcaacggcctgctcaagcttgtaaaactgtttattcgaccggatcgttccgaccctgccatggctgctgcgataagcgaaacctgatgattaccaagacccgccagaaagcccgcccctttgccatctcgcgttggagcgtccagcgcaagctggtgctggcgttctggctggtcagcgtgatccccaccatgatcgcggctgaactggccgccaccacgctgtcgcagattttcgacagtaacgtgcggatctggctgcaagagtcgaccaagatcgtcaaggacgaaatcggcgacatccttcacgacaacgcacgcatggccaagctgttcctgcgctacaccagcccgccatcgtccaaaaatgccgagcggcatgaccggctcaccgccgacattgccgatgccaccgatatcgacgtggtcgcgctgattcgcaccagcgaccgcaaagtgatgttcagcacggccgccgatgacatcgtcaggcagatcaacctcaccagcaacgcggtgctgcaaaccgtgcaggtcgccggcgtgagcacgggcctggtggtgtccacctttgaaaccagccgtgacggcgtggattacctgttgctggtcgccacttacctggacagcagtttcctcaccagcgtggccgatgtgcattccctagacctgcgtttgtacctggccaaccctgcagggttttccgaaatattttccacccagcgcttcgccaatcacccctcgcgcatccccaagaatgtcgaggcctacctacgtagcaccaagcagcccagcgaacagttcactaaccaatacagcggtttgtactggccgattttcaatgacgccggcgagttgcaaggcgtgatcttcagcggcctgctacgccacaccagcctggtggggttggtgaaccagagcaacctgttcgtgctgatcttcctggtcagctcggcgctgtcactggcggccgggttgttggtgtcgcggcgcctgaccaagcccctgcgcgatttgtcccagggcgtggatgcggtgatctcgggcagttatgcgcaccgtgtggtggtcagtggcggtgacgaactggcgcaattgagcagcaccttcaaccacatgaccgaacgcctgggcgagttgcaccatctggaagcccaactgcgtcggcgtgaccgcttgcatgccctgggtgaagtcgccatgggcctggctcacgaaattcgcaacccactgggcatcatcaagaccgccacccaactgttgcatcggcgcgctgacctggcggaaaccgacaagcgtcacctggaatatgtcatcagcgaagtcagccgcatcaacgacctgattaccgaattcctcgatttcgccaagcccaacccgccgatacgcgtgcagcaaccggcacgcgccctggtggaagaaatcctcggattctgcggcccggagctgagtagccatcgcattgatgcccatatcgacgaccaggcgcctggcgcgacgatctacgccgatgccaagcagctcaaacaggcctgtctcaacctgattctcaacgccatcgacgcgatgcccgacggcgggcgcctgaccctgggcattcgcagcgtgggcgacaacaccgtgatcagcatcgccgataccggcgagggcatccctgcggacatggtggagcgtatctttacgccatttgtcaccaccaaggcctcgggcacaggcctgggcctggccaaagtctattcgatcatggaaagtcacgacggcagcatcgaatgcgccagcgagaaagatgccggcgcgaccttcagcctgtacattccggctgacggtgaagacgacggtgaagatgaggacgggcatgacgcataacgtattggtggtcgacgacgagcccaagctctgtgatctgctgacccaggccttgagccagaacggcatccaggtgttcagcgcgggcaatggcttgcacgcgctcaaggtgctgggggaggaggacatcgacctggtcatcagcgactggcgcatgccgggcatggacgggccggcgttgctggccgagatcaaggtgcgttatccgaccctgccggtaatcgtgatgacggcctacagcacggtgaaaaacgccgtgcagtcgatgcgtaacggcgcctatgactacattgccaagccgttcgacattgacgagctggacatcaccgtggccaaggccctgcaatttcgcgacatcatgcgcgacaacgcgcgcatgcgtgccgagctggacgagcatgcgcagttcgacagcctggtgggcgacagcccggcgtttcgccaggtgctccaggcggtggattcggtgcgtgacagcaacgccaccatcctgctgaccggcgaaagcggcactggcaaggaaatggtcgcccgtgccatccacaagcatggcagccgtgccgaccaacccttcgtggcggtcaattgcgcggccattccggaaggcctgctggaaagcgagatgtttggccatcgcaaaggcgcgttcaccggcgccgtggctgaccgggtagggcgcttcatgcaggccgacaagggcacgctgtttctggatgaggtgggtgatatgcccttggcgttgcaggccaagattctgcgcgccttgcaggagcgggttatcgagccggtaggcgacccccgcgagcgcaaggtggatgtacgggtaattgccgccaccaacaagaacctgctggatgcggtggcggccaaggagtttcgcgaagacctgtattaccgcctcaatgtcttcccgattccgttgccgtccttgcgcgaacgcgtggaagacatcgcgcccctggcgcgccacttcgcccacaccctgagcgcgaccaccggcaaacgcatcaccggcttcagccccgaggccttgcaagccatggcggcgtatcactggccgggcaacatccgcgagctgcaaaactgcgtggagcgcgcaaccatcgtggcggcttcatcggtgatcgaggatattgatttgccggggtatctgtttgcttccaagccgagcgaaggcgatgtgaccgcgatcctcagcgacgggccgggggtgccgcgggatctggatgcggcgctggccgaagtggagaaagcctacatccttgcggcgctgcaggagagcaatggggtgcaggcggcagcggcgcagcggatcgggatttccgagaggagcttctggtatcgcctgaagaagctgggtattcaggtagacaagatcgtgcgctgatctgagtgtgggagctggcttgcctgcgatgatcgctcccacgcttcgcgtgggagtgccgctggtgacgctctgcgtcacgcgcgtggacgcggagcgtcgttggctgcattcccacgcgggagcgtgggaacgatctgccgcgttgtgtcaggtgtggaggcgtacccacacgctgaccagcaccgtcgcggccatcaaccaggccacggcagcgactgccagcgatgcctccaaccgcattcgatccaccatcacatacagcgtcgccaaatacacaaagtagggaatgattgaccacatcccgaacaggatcgtggtcttcaaatcctcaatcgaacggcctttgccgacgatgtaatgggcgatcagcgcaaaagtgggaaacagcggcaccaagcctgcgatgtaatagtttttggtcttggccagcgccgccaggatcagcaccactgcggcgccaagcgcagccttcaagaacagatccatcagtgactcaacccgtatttcttgaccttgtcgaacagggtggtcttggccatccccagttcctggctggcctgggtcaggttgccgccgctgcgttgcagggcatcgttgagcaggttgcgctcaaaggcttccaccgcctcggtaaaggcaaccccttggctgccgctgccggcgccgctttttttgaaggcgggcaggccgagggcgaagcgttcggcgacgttgcgcagctcacgcacgttgcctggccaatcgtggctcatcaggctggacagggtctggttgtccagctccggcacggcgcggtcgaagcgtagcgacgattgctgcaggaagtgctcgaacagttgcaggatgtcttcacgccgctcgcgcaggggcggcagttccagggtgacgacgttgaggcgatagtacaggtcgctgcggaactggctggcgcggctcaactcgtcgaggtcggacttggtagcggcgatcacccggcaatccaccgccacgctctggttcgaacccaggcgttccaacgtgcgttcttgcagcactcgcagcaatttgatctgcaggttgatcggcatgctctctacttcatcgaggaacagcgtgccttgatgggcatgctcgatcttgccgatgcgacgtttgccggcgccggtgaaggcgttggcttcgtggccaaaaatctcgctttcaaacaggttttccggcaggccaccgcagttgagggcaacgaactggtgggtgtggcgccggctgaaatcatgcaggcaacgcgcgaccagttctttgccggtgccggtctcgccttcgatcagcacgttggccgaggtatcggcgacattagcaatcagttcgcgcaggttttgcatggccggcgagcggccgatgatgcggccttccagcgagtcgcgctcggccagttgccgacgtagcgaccagacttcccgcgccagcccgcgttgttccagggcgcggcgtgccacgtccaccaggcgttcgggcgagaagggtttttccatgaagtcgtaggcgccgttacgcatggcgcccaccgccatggagatatcgccatggcctgtgatcaacaccaccggcaggcttttatccagggccttgaggcgggtcagcagttccaggccgtcgatgcccggcaagcggatgtcgctgatgacgatgccggcaaagttttcgccgatgcgcttgagcgcttcttcggcgctgcccacgccgacgctggtaatgtcttccagcgccagtgcttgctggcaaccgagcagtacatgggggtcgtcttcgacgatcaggacggtgaggtcttgggcttgtgtattcatgtcgactcaactcgttgagcgcccaccaatggcaggttcaggacaaaggcggtaccaccattggccggatgttccacggccaggctgccgccggtggcggccgcgaggctcgcggaaagggtcaggcccaggcccaggccttgttcgccgggcttggtggtaaaaaagggttcgaacaaatgcttgcgtgcttcgggatcgatgccgtggccattgtcacgcaccaacaggcggtatttgccatcgccgctctggccttccaaccacagttgcggcgccgcttgggcctgcatcgcatcgagggcgttgccgatcaggttgaccaggatctgctccaggcgagtctggtcgatctgcaattgggcattggcaaaatcacggtgcacggtcaacggcaggctgtccaggcgcgcgccgagcacctggaacgcggcgtccacggctttgccgaggctggcctcgccctggtcgtcaccgcgtcgggcaaaggaacgcaggctggcggtgatgcgacccatgcggtcgatcagttcgttaatggtcttgaggttggtgctggcggtgtccagggcgccgcgctcaaggaagcgtacggtgttgcccgacagcgtgcgcaaggccgccagcggctggttcagttcgtgggcaatgctggtggacatctggccgatggctgcgagtttgccggcctgaaccagttcgtcctgggcgtggcgcagggtttcttcggcctggcgtcgttcgcgaatctggcccttgagccgttcgttgctggcgcgcaagtcggcggtgcgctcggcgatccgccgctcaagctggctgttggcttcctgcaaggcttcccgcgcagcgaggcgggtggcgatgaccttgcgccgttcgttccaggcgatcagcaggaaggcgaccaggccaaaggcgacggccaccaggatgccctggttgatcgcggcgcggcgcaggtcgttaagtggggtgagcagggtgaaattccacggcgtgtcgttgagcgggcgtgtttgcgccaggtagctgacggcgtgctggtcgttgaccacttcggtgttggccgggaaggtcagtttctcggtgccttcgttcaggcgctcacgggccaggggttgcagttcattgagcgtcgcccagtaatattgcaggctgtgggccaggcggtccttggtgtcatcgctcagcgggcgtacggccttgaggcgacgcgccgggtcgctggaaagaataatgatgccgttctcgtcgcttacgaaggcttcaaggcgcgcacgttgccagcgttcttcaagggcttcgaggcgcaccttgaccacggcgacgccgatgatcttgccgtgttcttccaggccatgggccaggtaatagccgggctcgccgttggtgctgccgatgccgtagaaacggccgggctggccgcgtacggcattctgaaaataggcgcgaaaagacaggtcctcaccttggtaactgtcggcatcgcgccagttactggtggccagcacgcggccggtggtatccatcacatagatggcgcggctgcgactgcggcggttcaggccttcgaggtagtcgttgaccgtcttgcgggtttcctggttcgggtcggcgagcagttgggaaacactggactccagttccagcaggctggggaggtaggtgtacttgctcagttcgctttcgacggtgcgggcgtgcagctccaactggcgttcgccattgtcgctgagggtgcggatgccgtagtagtcactgacccagaagccgatataacccaggccgaccatcagggcgatgatcaacggcggcaggaacagttggcgtatcagacgaggcttcacggcaagtgatggcggcgcggcgcgatattgattggggtcgcatttcatcacagatgccttgggtcagctacttctcgcctgccaactgtaggagcgagttgcttttagtgctgcaggattttctcaaggaagtgctgcgcacgttcggagcgggcgctgatgtcgccgaagaactcttctttcgggcagtcttcgatgatcttgccggcgtccatgaagatcacgcggtcggccactttgcgcgcaaagcccatctcgtgggtcacgcacatcatggtcatgccttcgtgggccagttgcaccatcacgtcgagcacttcgttgaccatttccgggtccagcgccgaggtcggttcgtcgaacagcatgacgatcgggtccatggccagggcgcgagcaatcgccacacgttgttgctggccaccggagagctggccagggtgcttgtgggcgtgtgccgacaagcccacgcggtcgagcagttgcaggcccttcttggtggcttcttccttgctgcggcccagcacctttatctgcgcgatggtcaggttttcggtgatggtcaggtgcgggaacagctcgaagtgctggaacaccatgcccacgcgcgaacgcagttttggcaggttggtcttcgggtcggcgatggaggtgccgtcgaccacgatgtcacctttctggaacggttccagtgcgttgacgcacttgatcagggtggatttgcccgagccggatggcccgcacaccacgatcacttcgccttttttaacctcggtgctgcaatcggtcagcacctggaagtcgccataccacttgttgatgttcttgatagagatcatacggcaaaccttttttgcagacgcttgaccagcagcgaggcggaaaagctgatgatgaagtagacgacaccggcaaagatcaggaactcattggagcggccgatgatgtcgccgttggagcgggcggagttgaggaagtccaccaggcccacggtgtagaccagggaagtgtcctggaacaggatgatcgactgttgcagcagcaacggtgtcatcttgcggaacgcctggggcaggatgatcaggcgcatggtctggccgtaggtcatgcccatggcttgtgccgccgccatctggcccttgggaatcgactgcacaccggctcgtacgatttcgcagaagtacgcggcttcgaacatcatgaacgccacgacgcaggaggtgaatgcgccgatcggggtgtcttcacccgtgatccagcgcaacacgaacggcaccgccaggtagaaccaggtgatcaccagcagcaaggggatcgagcgaaagtagttcacgtaggcgccggccacgcgggacagcagtttgttggacgacaagcgcatcagggccaggatagtcccgatgatgatgccgccgaccacgcccatgaccatcagcttcaaggtcatgaccatgccgttccacaggcctggaatagcggggatgatgccgctgaaatcgaagtccattatttgccccccacggagatcaggccgggcactgcgactttcttctcgaccacgcgcatcagcagcatcaggctcatgttcagggtgaagtagatcagcgtggccagggtgaaggcttcaaacaggttggccgagaactcggcggtctgtttggtttgcgccagcagttccatcaagccgatcaaggacgccacggaggagttcttgaacacgttgaggaattccgaggtaagcggcggaatgatgatgcggtaagcctggggcagcagcacgttccagtagatctgcggcagcttgaagcccatggcgcgcgccgcggattcctggccgcgtggcagcgcctggataccggtacgcacttgttcacacacacgggcggcggtgaacaggcccaggcacaccacgacgctcaggtaggccgaggtggtcgggttcaggtcttgtttgtaccagtcctgcaggttctgcggcagcatgtccggtaccaggaagtaccagatgaacagctgaaccagcagcggcacgttacgaaacagttccacgtagcaggtcgcgatgcccgatacgaggcggtttggcacagtgcgcatgacccccagaatggagcccagcagcaaggcgataatccatgccacgatagcgatggcgatggtccagcccagcccggagaggtaccagtcgagataagtctcgctgcccacgccggtggacttgaagaacacgccccagtcccagttgtaattcattagggtctcccctcgagatcgatcgatgtacaagcacccgcttggggaagatccgttcccgcctgacgttgaacgccaggcacacacgatcggctcgaaaaccgccaggtcgagtgttccaagttaaaaccagcaggtaattacagacgcctgagggagggttggctccctcaggacataagcttagtcaggtatcagatttttacttctggcgctggtttgtcgctagggttagcgatcagctccttgaccttgtcgctcatcgggaagttcaggttcaggccctttggtgggatcgggctttcgaaccatttggcgtagatcttgttgatctcgccagacttgtacagggcgacaatggcgtcatccacggctttcttgaagtccgggtcgcctttgcgaaccatgcaagcgtaggcttcgaatgactgtggagtaccggtaatgacccagtcatcaggcttcttggccttggcttcttcaccggccagcagggcgtcgtccatcatgaatgcaacggcgcggccgctttcgagcatctggaaggattcgccgtggtctttggcggagatgacgttcatgcccatctgcttgtcggcgttcatcgccttgatgatgcgctccgacgtggtgccggcggtggtcaccacgtttttgcctttcaggtcggcaaagtcagcgtaggacggcttgccttccttgtctttcttgaccagcaaacgggtgccgatttcgaagatgttgacggtgaaatcaacttgctgggcgcgttcggtgttgttggtggtggagccgcactccagatccgcggtgccgttctggatcagcgggatacgggtttgcgaggtcaccaggttgtacttggctttgaggtcgggtttgttcaggtcttttttcagctgctcgacgacggccaactggatgtcgtgggagtagcccacgggtttgcccgaaccatccgcgatgtaggaaaacggaatggagctgtcgcggtgagcgagagtgatggtgccggagtcgttgattttcttcagtgtgccggtgagttcggcggcaaaaactggagtgctgatcagagcagcagcgatagctgcgcccaggatatggggaacgatgcgcatcaatacttcctcgacatttgttttttttatgaagccagctgaacggctctcttgtacagcgactgcccgtgacggctcctaaggcgcctcaggcaatcgttgaagagtgtagagcatgagtcgtgccataccgaaaataaaaggataactgcatgatttatatggaaattaactttttgtttcggcgatatttttggtggccggtccggcaaaccgaatagcgcacaggagcttgttcggaaaaccgaatagcctggaggagcgagcttgctcgcgaaaaacgcaaaaacgccgcgtttaggctgaataaacgcggcgttctcaggtttttcgcgagcaagctcgctcctacacggtagggcggtcaggcggcttcgatcttgctgcggctctgctcgaccttggacaggtagcgttgcaggttttcctgctcctgctcggtggtgaacaggccaagcttggtgcggcgccacagcacgtcctgcggttgtgtcacccactcttcggcgcacaggtaatcgacttcgcgggtatacaggccgccacccaggtgatcacccaggtcggcgagcgattgcacgccctccagcaggcgccaggtgcggctgccgtaagtggtggaccagcggcgggcgatctcgctcggtacccagtcgaacttggcgcggatggcgtcggccagggcttcaggggtgctcatattttcgccgccgggcaggctcgccgtggcagtccaacttgggcgcatctgggtgaagtacggcgccagttgggccatggccgactcagccagtttgcgataggtggtcagcttgccaccgaacaccgacaggatcggcgcttcgccggtgccgccggacaaggccagggtgtaatcgcgcgtgatggccgatgggttgtccgactcgtcgttgcacagcgggcgcacgccggagtaggtgtgaacaatatcgtcacggctcagttgtttcttgaagtgcgcgttgaccaccttgagcatgtagtcggtttcaccttcggtgatcgccactgcagccgggtcgccggtgtattcgcggtcggtggtgccgatgatagtcaagtggttcaggtacggaatggtgaagacgatgcgctggtcttcgttctgcaggatatgcgcgtgggcgccttcgtacaggcgcggcacgatcagatggctgccctgaatcagacggatgccgtagggcgaatccagcttcaggtcgtccttgatgaatttggccacccaagggccggcagcattcaccagcgcgcgggcgcggatcgagaacaggctgccgtcggcacgctccatgttcatttcccacaggccgttactgcgatgggcgctgacgcaacgggtctgcgtgtggatgtgcgcgcctttctcgcgggccgccatggcgttgagcacgaccaggcgagcatcatcgacccagcagtcggagtattcgaaaccttgggtgatttcgcttttcaacgggctgtcagcaccgaacttgaggcttttggagcctgccagtttctcgcgcttgcccaagtggtcatacaggaacaagccggcgcgaatcatccacgccgggcgcaggtgcgggcgatgcggcagtacgaagcgcatttgcttgacgatgtgcggcgctttgcccagcagcacttcccgttctgccagggcttcacgcaccaggcggaattcgtagtgttccaggtaacgcaggccaccatggatcagcttgctgctagccgaagaggtgtggctggccaagtcatccttttcgcaaaggaataccgacaaaccgcgaccggctgcgtctgctgcaatcccgacgccattgatcccgccaccaattacggcaacgtcatagacttcggcaagcggtggagcaggcaaggtggaagggttcatcggctggcctcgcgatcttttcgtcttggaattcgaacatgaatgttcatttgcgaaaatggtagctgataattgcgggcacagccacccgacttcgattgaaaaaactcatcgaagggtggggaaaggaagaattatgaacaaaggtgaatgtattggtgttagtgaggccgtcatcgcgggcaagcccggctcccacatttgaccgcatttcaaactgtgggagccgggcttgcccgcgatgacgcctgaacaggcgctacaccacttccagccgcaccttgtgctcattcagcacttgcaccaacgccggcaccggctgttggtcagtcaccaggcagtccaccaggctgatcggccccaggcgaatcatggcattgcgcccgaatttgctggagtctgccgccagaatcacctgtcgcgcattggcgatgattgcctgggaaacccgcacttcctggtaatcgaagtccagcaggctaccgtcctcgtcgatcccgctgatgcccaccagggcaaagtcgaccttgaactggttgatgaagtcgacactggcctggccgaccacgccaccgtcacggcgcacattgccgccggtgagcaacacatcgaagtcgtccttggcactgagcatggtggcgacgttgaggttgttggtgatgattttcagatggctgtgattgagcagcgcacgggcgatggattcggtggtggtgccgatgttgatgaacagcgaggcgtgatcgggaatctgtgcggcaatggcttcgccgatgcgttgcttctcgtcgcgcatctggtcggcacgcatggcgtacgcggtgttctcgacgctggagtcataggctgcgccaccgtggtagcggcgcaacaggttggcgtccgccaactggttgatatcgcggcggatggtttgcggggtgacaacgaatagctgcgccatttcctcgatactgacatagccgcgttcgcggaccagttcgaggatttgttgttggcggggaggcagattcatggggcgtcctttgggctgccatacaaaagtggcccatgatgacgcaggaatccgctccctgccagttacaccttattcagcgctttcgtgcggctcccagtcacgggtgcggctcacggctttttgccagccggcgtagagtttctcttttgccgcttcatccagctgtggctcgaactcgcgttcgatcactgccttgccgcgcaactcgtccaggctgccccagaagccacacgccaggcctgccaggtaggccgcgccgagggcagtggtttcacgcatttgcgggcgttcgacctgggtgccgagtatgtcggcctggaactgcatcaggaagttgttggcaaccgcacctccgtccacgcgcagggccttgaggcgttcgcccgagtcctgctgcatggcgtcgaggacgtcgcgggtctggtaggcaatcgattccagggctgctcgaataatgtggtctacgcgtacgccacgggtcaggccgaacagtgcgccacgggcatacgggtcccagtagggcgcgccgagaccggtgaaggcgggtaccaggtacacgccgttgctgtccttgaccttgccggcaaagtattcggtgtcgtgggcatcgttgatgatcttcagctcgtcacgcagccattgcacggtggagccgccgttgaagaccgcgccttccagggcgtaggccacctctccgcgcgggccgcaggcaatggtggtgagcatgccgtgcttggatttcaccgccttgtcgccggtgttcatcagcaggaagcagccggtgccgtaggtattcttggcctggcccgcttccacgcacatctggccgaacagggcggcttgctggtcaccggcaatgccgccgatagcaataccgctcttggtgcggccataaatttccgacgacgacttcacttccgggagcatttcccggggaatgtcgagaatctccagcatcttcgcatcccactccagagtgtggatgttgaagagcatggtgcgcgaggcgttggtgtagtcggtgacgtgggtcttgccgccggtaaatttccagatcagccagctgtcgacggtgccgaacagcagttcgccgttgcgtgcacgttcgcggctgccttcgacgttgtcgaggatccacttgagcttggtgccggagaagtacgggtcggtcacaaggccagtggtgtcgctgatgtattgctcatggccatcgcgcttgagctgctggcagatctcggtgctgcggcggcattgccagacaatggcgttatagattgggcgcccggtgaccttgtcccagaccactgtggtttcacgctggttggtgataccgatggctgcaacctggtcatggtgcaggccggcctgggccagcgcttcgaccatcaccgcgctctgggtggcgaagatttccattgggtcatgttcgacccagccagcctgcgggtaatgctggacgaattcacgctgggcggtacacaccacgttggcgtcacgatcgaagatgatcgcccgggaactggtggtgccctgatcaagggcaatgatgtagttcttattctgaaggtcggtcatgtcaattgccttggacgaaataaggaagtcagaaatcagcctgggccgtgaagggcaggggaccaggctggcgctttcaggaaatacgagtcttgccgttgacagccgtgtcaggtgtttcttcagcaatagccggtgcggcgctcggcaggtggcgagcgatcagaccgcgataagccgcagcaccgaggcatgcgccgacaatcggggcgaaaatcggtacaaggaagtaaggaatatcgcgaccgccagtaaaggccatttcaccccaaccggcgaaaaaggtcatcagcttgggtccgaaatcccgtgccgggttcatcgcaaagccggtcagcgggcccatggcgctaccaatcaccgcgatcagcaagccgatcagcaggggcgccagcgggccgcgtggcaggccgttgttgtcatcggtaagggccatgatcacgcccatcaggatggcggtgatgaccatttccaccaggaacgcctgagccgtgctcagcagcgcatgagggtaggttgagaacaccgaggccaattccaggctggcttgggagccgcgaaccatgtggtgggtttgttcgtaatcgaaaaacagattgctgtagagcgtgtacaccaaggcggcggagcagaaggcgccggcgacctgggcaagaatatagaagggcagtttgcgcttttcaaaatcggcaaagatgcacagggcgatactgaccgccgggttgaggtgagccccggaaataccggcgctcaggtagatcgccatgctcacgccgaccccccagatgatactgatttcccacaagccaaagctcgcacccgcgaccttgagcgcggcgacgcatcctgtaccgaaaaagatcagcagcgcggtgcccaggaattcggccatgcattggctcgaaagtgaaggctgttgaagagcagttgtcatggaaaacctcaattgttgttcttgtcttgcgcacggcctcaacgggcagttgcgcgatattcaccgcgcaaggatccccatcctgggtcacggcttattgcaggagtaccaaaggattattcctacggtattcggaaacgaaaaaatatagacaagaatgaccgctgtcaaaggtcgaaagtgaaccattggtcatttccgaactattggtgtggtgaatgatcatgctcaaggcgcgtcactttagcggtaataggactgtgctagagcgtttcacgtggtcttggcctagaattggccatcagtttgcccgcccggagccgctatgacccccgcattggacctgttgaaaaaagttcgcgccgaacatcgtatccatagttatgaacatgatcccaaggcagcatcctatgggctggaggccgcggagaaattgagcttggacccggcccaggtattcaagacgctgctggcgagcagtgagaagggtgaattgttggtggcggtggtgccggtcgtcggaagtctggacttgaaagccctggctcacgctgcgggtgtgaagaaagtcgaaatggctgacccggcagcggcgcagcgctcaacgggttatctgttgggcggcatcagtccgttgggtcagaagaagcggctgcgcacgtttatcgatgaaacggcgcaaccctttgcaacgatttttgtcagcgcgggcagaagaggattggaagttgaattgccagcggcggtgctggcagaacacacccaggccaaattcgcaccgattggtcggacctgataatcattctttgaagtctatgaggatcaaaatgtgggagctggcttgcctgcgatagcatcaacgcggtgtgacagataacccgagttgtctgcatcgcaggcaagccagctcccacagtttgacccggtttcgtcagtgggcgacgctgtggcggcgcacgcctgactcaacagcaggaatctgcgccgccgtgctgccggatgcctggaacaccaccaaatgctcagccgccacacgaatccccacctctgcgcccacttggtgatcggcatggctggggaaaatcgactccaactgagcgccggtcggcagctgtaaccggtacagcgttgaggcgccgaggaaggtcttgccaacgatccgggcttttaacgcgctgcccggtgcgtaaacgatgtcatccgggcgcagcagcacatccaccgcagcaccggtcggcaaggtgtaggctcggttgccgcgcaggtcgcccagttcagtgctgaccgattccggtgagttcaatcgaccacggatgaaatacccctggcctatgaaactggcgacgtaaggcgtctgcggttcgtgatagaggttgtagggcgtgtcccactgctctagccggccttccttgaagaccccgacatgatcactgacggcgaaggcctcttcctggtcatgggtcaccaggatcgcgctggtgccgcgtgccttgaggatgtcgcgcacttcatggctgagtttgcggcgcagctcaccatcgaggttggaaaagggttcatccaacaacagcagttgcggctccggcgccagggcgcgggccagagcgacacgttgttgctgaccaccggaaagctcatggggaaagcgtttgcccaggttcttcaagttgaccagttccagcaactcggcgaccacgcgctctttttgcgggtgtttgcgaatgccaaaggcgatgttgtcagccacgctcaggtgcggaaacaacgcgtagtcctggaacaccatgccgatacgacgtttctccggcgcaagggtgaacccggcacgggagatgacgtcgcccgccaggctgatttcgccttcatgcaccggctcaaagcctgcaatcgcgcgcagggtagtggtcttgccgcagcccgaagagccgagcaggcaaccgatatcgccggcgttaaggtgcaggttgaggttctgcaccacacgttggtcttgatagccgcatgccagattgcgcaggttcagcagtaatggctggctcatgcgtggtggtacgacggcgggacgaggaattcgagcaaggctttttgcgcatgcaggcggttctcggcctgatcccacgcgactgagcgcggatcgtcgagcaggtcctggctgatttcttcgcctcggtgggcgggcaggcagtgcatgaacagcacgtccggcgcggccaggtcgagcaacgcgcgggtcacctggaacggcgcgaattgggccaggcgtttggcggtttcgtcttcctggcccatggaggtccagacgtcggtgctcaccaggtgcgcgccgaccactgcgtcttttggatcgcgcagcagttgcacacggccatcggccttggccatgaactcggcgctgggctcgtagccttcagggcaggcgatacgcaggtggaagtcgaactggatcgccgcttctatatagctgttgcacatattgttgccgtcgccgatccaggccacggtcttgccttggatcgagccacgatgttcgagaaaggtttgcatgtcggccagcaactggcaggggtgcaggtcatcggacaggccgttgatcacgggcacgcgggagttggcggcaaattcggtcagggtgctgtgggcgaaggtacggatcatcacggcgtcgagcatgcgcgacatcacgatggcgcaatcgctgatcggctcaccacgacccaattgggtgtcgcgcggtgacagaaagatcgcctggccacccagttggatcatgccggcttcgaacgacaggcgtgtgcgggtcgaggacttttcgaaaatcatccccagtacacggtttttcaaaggctcaaacagtacgccgcggttacgcaggtctttaagctcaatgcctcgacggatcacgctgaccagctcttcgggcgtgcaatccatcagggagagaaagtgccttgcgctcatcattaactaccttttgcaacagaccgcagatactcaaagccttgtttatagcgacaacgggcgagacctgcggcgaaagccgcacggggcgacgaaataggggaagacgcgatattgacattaaatgtcgcgttttaccaatagggctacggctttaggggtgttcaagcagggcactgacgcgcgtttgaagacgatttcctgacagcagcgagccatttgtacactggcgtccaggccttttgcaatgcgcgggggcgggcttgggctaggtcgcgtcggtttcagcgcctgtgggcaaggtttttgaaacatttgctcatgcttagccatggcctggcctatgcccgtcgattcacaacgcgaaggttgctggcgcctcaaggggtcgcggcccatagttgagccaaagcccctataaaagagactggccatgaccacgactctccaccaccgtgcctgccacctgtgcgaagctatctgcggcctcaccctggaaaccacccaagcccaagacggtagcctggcgatcacctcgatcaagggcgaccccttggacagtttcagtcgcggccatatctgccccaaggccgtggccctgcaggacatccagaacgacccggaccgtctgcaccaacccatgcggcgggtgggcagccaatggcagccgattgcctgggatgaagcctttgccctggtggccgagcggctcgcgggcatccaggcccggcacggccagaacgcggtggcggtgtatcagggcaaccccagcgtgcataactatgggttgatgacccacagcaactactttctagggctgttgaagacgcgcaatcgtttttccgcgacctcggtagaccaactgcctcatcacctcaccagccacctgatgtacggccacggcctgttgttgcccatacccgacatcgaccagaccgacttcatgttgatcctcggcggcaacccgctggcctccaatggcagcatcatgaccgtgcccgatgtggaaaaacgcctcaaggccatccaggcgcgaggcggaaaagtggtggtggtcgaccctcggcgcagcgagacggcggccattgctgaccagcacttgttcgtacgccccggcggcgatgcggcgttgttgtttggggtgctcaacactttgttcaccgaagggctgacacgcgatagtcatttgccggtggagggcctggacgaggtgtgcagggcgatcgccggctttcatgccgaggccatgagccgccagtgtgcggtgcctgccgagcagattcggcagttggccagggacttcgccggcgctgacaaggccgtttgttatggccgcatgggcgtctcgacccaagcgtttggcacgctgtgccattggctggtgcaactgatcaacctggtgaccggcaatctggaccgcgtcggcggcgcgctctgcaccagccccgcggtggacctggtggcctccaccagcggcggccatttcaaccgctggcagagccgcgtgtccgggcgtccggagtacggtggagaactgccggtgtcggcgctggccgaagaaatgctgaccgagggtgaagggcagatccgcgccctggtgacggtggccggcaacccggtgctgtccacacctaacggtcgccaattggagcaagcactggacgggttggaattcatggtcagcatcgacctgtatatcaacgagaccacgcgttatgccgacctgatcctgccttccacctcggcgctggaaaacgatcactacgacaccaccttcaatctgtttgcggtgcgcaatgtcacgcgcttcaatcgcgccatcctgcccaagcctgagggcgcattgcatgactgggagatctttgtcggcctggccaaggcatttgcggcgcacactggcgttgcgcttaagcccaccctgccaccggcgcagatgatcgacttcgggctgcgtgcgggtgcctatggtgacgcatccagtcataagttatcggtggcgatgttggcagagcatccccatggcatggacttggggccgctcaagcccaacctcgcggcacgtttgaaaaccgcggatggcaaggtgcaagcagcaccgctcgtgatcctcgcagacctggcgcgtttcgccgcgcagccggtgccgatggccgacgaactgttgctgattggccgacggcatgtgcgcagcaataattcctggatgcataactatcaccggctggtaaagggcaagccacgccatcaactgttgatgcaccccgacgacctgacccgtcggcagttgagcgatggccagcgcgtgcgagtgagttcgcgcaccggcatgatcgaagtggaagtggtggccagcgcggacatgatgccgggtgtggtcagcctgcctcacggctggggccacggtcgcccaggcgtgcagatgagcatcgcgagtagccagccgggagcgagtgccaatgacttgaccgacgagcggcaattggatgagttgtcgggtaatgcggcgcttaacggcgtaccggtgaaggtagcggcggcctgagcatcccgctggatttttgcgttacaatgcgccaccgtgccgacccgtgagtcgcaaagttcctgcagaggtgttccatggatatcatcgaaacgatcaaagagcagattgccaacaacaccattctgctttacatgaagggcgcacctaacgcgcctcagtgcggtttctccgcgaaagcgtcccaggccgtgatggcatgtggcgagaagttcgcttacgtggatatcctgcaaaaccctgaaatccgcgccaacctgccaaagtacgccaactggccgactttcccgcagctatgggtagccggtgagctggttggcggtagcgacatcatcactgaaatggcagctgatggttccctgcaaacgctgatcaaaggcgcagcagctaagactgacgcctaataggcgagcaataaaaagccccgcttctcacaagagagcggggctttttttgagcttttctgtaggagcgagcttgctcgcgaagaacgtcaacgataacgcagcgcgcctggtttaacgcgttgcctgggagtccttcgcgagcaagctcgctcctacagtgataacaagcgcagttattcacccatctgcgattgcaggtaattctccaggctgaccttgtcgatcaggcccagctgggtttccagccagtcgatatgctcttcctggtcttccaggatatcttccagcagttcacggctgccgaaatcacccttggtttcgcagtgagcgatggcggccttgaggtcgctgtggctcttgcgctcaaagcccaggtcgctgttgatcatttcctgggtgtgctcgccgatgttcagcttgcccaggtcctgcacgttcggcaggccttccaggaacaggatgcgcttgatcagcgcgtcggcgtccttcatggccttgatcgactctttgtattcacgcttgccgagcttttccaggccccaatcgtcgtacatgcgcgcatgcagaaagtactgattgatcgcgaccagttcattggcaaggattttgttgagttgctggatgactgagatgtcgcctttcatgactggggtcctgccctgtaatagctgtgtatagggcggagtctgagcggtgaaaatcctagtgtcaaacctaagttattgaataataaatgaaaattaatcggaataagaatgtttgtgttccgcgtcttggtgctaactatttgaattgatggcataaaaaaaccggacactaggtccggttcttcaaaaacatgcctattcaagcgtgtttaaattctgctgggtaggggagcgcggcctgggctgtttgcagctgcgtcagggtttcccgtaccacttgcttggctaggcaagcacatttgccacactggctggctacgccggtggtttcacgtacttccttatagctgcagcaaccttcgtagattgcttcgcggatttgtccgtcggtgacgccagtgcagaggcagacatacataagtgagaaccgtcgcgggtttgaggcttaagtgcgatggatcttaatgttaacgagaatgattgtcaaaatagtttcatccccaatccagcgcacattgaccatgcgctgacgaacggttttttcggtgtatgatggtcggtctttacgaagcgtgattgcgtcatgtttctgtcgattttccccggcagacttgacctgtccttttacttcaatcgtcaccccacatcaggagataccctatgagcgtactcgtcggtaaacaagccccggatttcgacgtaccagccgtgctcggcaatggcgaaatcgtagacagcttcaaactgtctgaagccatcaaaggcaaatacggcctggtgttcttctacccgctggacttcaccttcgtctgcccgtcggagctgatcgccctggaccaccgcatggacgatttcaaggcgcgtaacgttgaagtggtcgcggtttccatcgactcccacttcacccacaacgcctggcgcaacaccgccatcaatgatggcggcatcggcaaagtcaaatacaccatggctgccgacatgaagcacgacatcgccaaggcctatgacgttgagtccgaaggcggcgtggcgttccgtggcgcgttcctgatcgacgacaagggcattgtgcgttcgcagatcatcaacgacctgccgctgggccgtaacatggaagaactgatccgcctggtcgacgcgctgcaattccacgaagagcacggcgaagtctgccctgccaactggaaaaaaggcgacaaaggcatgaacgcttcgccagaaggcgttgcggcatacctgaccgagaacgctggcaagctgtaagccaacgtcgtggtattaaaaaaccggcctgtgaaggccggtttttttgtgggtggggacttgctcccgtgacggcctgacagcctacgctggtctacctgacaccccacaatccaactgtgggagctggcttgcctgcgatggcggcctaccagccaacacttctctacctgacaccccacaatccaactgtgggagcgggcttgctcgcgaaggcggcctggcagtcaacacagttggattgtgtgcatatccactgctgcggtaacggccacttagggttccgccctggcggctcactttcgaaaagccggaatgccggcccagacaaaagtaagcaaaacgctcttgccccaccactcggcacctcgcttaggctcggtnnnnnnnnnnnnnnnnnnnnnnnnnnnnnnnnnnnnnnnnaagcaaaacgctcttgccccaccactcggcacctcgcttaggctcggtgtgcccgaacgcaggcttgaatccgtgggccgccgccacgcgccatccatggcgcggggcggctaacccggcgtcctgccgggttagccacgaattcaagcctgcgttcggccagcgtggtttaacggggcgcctgagatcaagatcataagcagatcaagatcaagagcggctcgcttcgcatcgtggttagcgtctgctgcgacaacctacaaaattgtgtaggtacctatgctcatcggggctcagtcgttgaagtcttcccagccacccatctgtttccagcgattgacgatgccgcagaacagctcggcggtcttctcggtatcgtagcgggccgagtgggcttcacgcccgtcaaagtcgataccggctgcctggcaggctttggccagaacggtctgaccgtaggccaggccggcaagggtggcggtgtcgaagctggagaacgggtgaaatgggttgcgcttcatgtccagccgcgccacggcggcgttcaggaaacccaggtcgaaactgctgttgtggccgaccaggatcgcgcgtttgcagccattggccttcaacgccttgcgcacgccgcggaagatatcggtcagcgccgcttcttcactcaccgccatgcgcagggggtggtcgagcttgatcccggtgaactccagggcagcggcttcgatattggcgccttcgaagggttctacgcgaaagaaatgcgtgtgctccgggtacacaaagccctgttcgtccatgccgatggtggttgcggcaatttccagcaaggcatcggtggcgcagttgaacccaccggtttctacgtcgatgacgaccggcagatagccgcgaaaacgctcggccatcggatggcgcgagccgccaccgccgtgctcttgttcgtcgtcgtaatggtcttcactcacttgctttcctccagcaggcgccagcgcagtgtttcaccggcgcgcagcgggataacggtcagctcgccaaagggcaggctggcaggggcggtccagtcttcacgaaccagggtaatgcggtcggtattcgccggcaggccgtagaaacgcgggccgttgaggctggcaaaaccttcgagcttgtccagcgcgttacgctgttcgaatgcttcggcgtacaactcgatggcggcaaacgcggtgtagcagccggcgcagccgcatgcggcttccttggcgtgctgggcgtggggcgccgagtcggtaccgaggaagaatttcgggctgccgctggtggcggcatccagcagggctacctgatgggtgttgcgcttgaggatcggcaggcagtagaagtgcggccgaatcccgcccaccagcatgtggttgcggttgtagagcaggtgatgggcggtgatggtcgcgcccacgttggccgacgcctcactgacaaactgcacggcatcggcggtggtgatgtgttcaaacaccactttgagcgtcgggaacaactcgaccacacgccgcatgtgttcatcgatgaagattttttcgcgatcgaacacatccacgtcgccacgggtgacttccccgtggatcagcaatggcatgccgacctccgccatggcttcgatcgccggcaagatcttgtcgatactggttacaccggaatcggagttggtggtcgcacctgccgggtacagcttggcggcgtgcacataaccgctggccttggcttcacggatttcttcaggctgggtgcggtcggtcaggtagagcaccatcaacggttcgaagcggctgccggccggtcgtgcagcgaggatgcgctggcgataggcgtcggcttctgcggcattgcgcaccggaggtaccaggttaggcatgatgatggcacggccaaacgtgcgggccacatcggccacggtttggggtaacgcagcaccatcgcgaagatgaatatgccagtcgtcgggacgcagcagggtcaggcggtcggacattggggattccaggcgggtcaatctggtgggaatgctaccggaaaagactcttgcaggcactcgctatcaagttttgccggatgctaccgatatctccgggtatgccttaacgatgtatgacgctgtgaagtgttgtagaaacccatggagcctcccgtgcgccagtattatctagccctgctcagtgtgttcgccagcctgcctgcggcggccctcacgttccagacacgtctggagaatattgagtggaaggtagagggcgatcagttcgagtgccgcttgacccagccgatcaccgatttcggttccggtgaattcgtacgccgggccggcgaacaggcgacgtttcgtctgaaaacctatggcagcagcctcggcgccggctcggcaaccctgttggccgctgcggcgccgtggcaaccgggccgaggtgatatcaaccttggggccgtgcgtgtcggcagcggcgacgtgctgttcaatagctcccaggcccaggccggtcgcctgttcaccggcttgctcgaagggcgcagcccgacggtgcggcattacgggcgtgaaggtggttactcggaaattcgcctgctgccggtgaagttcaacaaggcctataacgattatcagctgtgcaccaccaagctgctgcccatgaattacgaccaggtcaaacagaccgaagtgggcttccccggtggcggcattgagctggacgcggcggccaagaagaagttgtccgtgatcctagccttcatgaaagccgatcccacggtcaatcatgtcgagttgaacggccattcggacaacagtggcaaccgtctgaccaaccgcgacgtgtcccgccgccgtgccctggcggtgatggactacttcaaggccaacggcatccaggaatcgcagatcacgatgcgcttccatggcgaaagctaccccttggcgcccaacaccaatgccgccaaccgtgcgcgtaaccgtcgtgtgaatattcagcttgagcgcgtggctacgcctgagaaaccggcgccccaggccactgcgccgagcaacccggcggcgacctcataagaggcgaccatcggtcgcccactcgacataatctgtcgctttatcttcatttgctgtcgcgcccctgtaatttcgcggttttgatcggtagaatcgtcgcctttccgtacaaccccgtggagtgatggcatggccgacgtaaacaaggtcgttctcgcgtattccggcggcctggacacttcggtgatcctcaagtggctgcaggatacttataactgtgaagtggtgaccttcaccgctgacctgggtcagggtgaagaggtcgaacctgcacgtgccaaggcgcaagccatgggcgtgaaagagatctacattgacgacctgcgcgaagagttcgtccgcgatttcgttttcccgatgtttcgcgccaacactgtctatgaaggtgagtacctgctgggtacctccatcgcccgtccgctgatcgccaagcgcctgatcgagatcgccaacgaaaccggtgccgacgccatttcccacggcgccaccggcaagggcaacgatcaggtccgtttcgaactgggtgcctacgcactcaagccaggcgtgaaagtcattgcgccgtggcgtgagtgggacctgttgtcccgtgaaaagctgatggattacgctgaaaagcacgccatcccgatcgagcgtcatggcaagaagaagtcgccgtactcgatggacgccaacctgctgcacatttcctatgaaggcggcgtgctggaagacacctggaccgagcacgaagaagacatgtggaaatggaccgtctccccggagaacgctccagacaaggcgcagtacctggaactgacttaccgcaacggcgatatcgtcgcgctggacggcgttgaaatgaccccggccaccgtattggcgaccctgaaccgtatcggcggccagcatggtatcggccgtctcgacatcgtcgagaaccgttacgtgggcatgaagtcccgtggctgctacgaaaccccaggcggcaccatcatgttgcgcgcgcaccgcgccatcgaatccatcaccctggaccgcgaagtcgctcacctcaaagacgagctgatgcccaagtacgcgagcctgatctacaccggttactggtggagcccagagcgtctgatgctgcaacagatgatcgacgcctcccaggctcacgtgaacggtgtcgtacgcctgaagctgtacaagggcaacgtgattgtcaccggtcgcaagtccgatgagtcgctgttcgactccaacatcgccaccttcgaagaagacggcggtgcctacaatcaggccgacgcggcaggcttcatcaagttgaacgcactgcgcatgcgcattgctgccaacaagggccgctcgttgttctgagtcgcgcgcctgttgtgaaaaatggcctcttgcgcaagaggccattttttttgcctgggtttttatgggcgctttaaaaacagagccgtgtattaatgtttagcctgtgtttaaggattttttcgtaacttgcgcaattattttccggttttgtcatttgtttttaagtctgaatgattttttacatctgaggaggaactatgtctgacagaaaattcactcatgtagttgcaatggatatgtgaattgttgaattttctgtaggaattttggaagtgctgaaatatgttaaatggaactaatgggaacggttgttccggattgatttgtgcgcgtcacggcgacaagcaaggggcatttcctgaaagtgttgtgcggcacgtttactttcaggggctaatgggcacgatatttcactcaaaatatgtacgcgtcgagaaaggtctgaaagcagccataaagctctatgcatctaagttggcgattttttgtaggttaattcctatcttcttgtgggttgggtctctgcctgctctcgttcgggggggaatgctatgccaactagtaatcgactaggctattgtgtttgctctaaataattcgaacagcgaaattggactttctcatgaataaagtgctgatcgtggatgatcatcccgtcattcgtcttgctgtgcgcatgctaatggagcgtcatggttatgaggtcgttgccgagactgataacggtgtcgatgcgttgcaacttgcacgggaacatatgccggatattgtgatactggatatcggaatccccaagcttgacggcctggaagttatttgtcggctggcatcaaccaagcaagccgtctcgttcaaggtgctggtgctgacgtcccaggcccccggccatttttccatgcgctgcatgcaggcgggggccgccggctatgtgtgcaagcagcaggatctgacagagttgctcagtgccatcaaggcggtgctttccggctatagctatttcccgaaccaggcgctcaattcggtacgctcaaccatgggcaatgccagtgaagccgacatggtcgaacgcttatcggggcgggagatgatggtgctgcagcagctggcccgtggcaaaaccaacaaggagattgccgatggcatgttcctcagcaacaaaaccgtcagtacctacaagacgcgcttgctgctcaagctcaatgcccggtcccttgtggacctgatcgaactggcccagcgcaacggcctggtttaggaggatattgcaccccttgaatacccgtgtaaccggcagaaaaaagcctccgtcagggaggcttccggccgccaacggctcgatcagaaatcgaagtcgtaatcggccagctgtttttgcaagcgtcgctcttccagaagattgtcgatagtgcggcgtttgctcaaattggtcttggccacctctgccaccggtgcctctaccacatcgtcatccgactcaacgaggtcgtcttccacttccagttgttcgttgccagcgctcataaggtcaactccaggctaagactgccgttggggctccttatagcgataatccgcggacgggtaaaaaagattttttcaatcgtctgatcacaaaaaccaatgatcgctcaatcgtcggaggttttgtccttgtattcgcacaagtcttcgatacggcagctcccacagcgcggcttgcgggcctggcaaacgtagcgtccgtgcaggatcagccaatgatgggagtcgagcaaatagggcttgggcacgaacttcatcaactgcttttctacctcaaccacattcttgccccgtgcaatgccggttcggttgctgacgcggaaaatgtgcgtgtccaccgccatggtcaactgccggaatgccgtattgagcaccacgttcgccgttttgcggcccacgcctggcaaggcttccagggcttcgcgggtttgtggcacctcccccccatgcagctccaacagcaggcggcatgtttcgatcacattcttggccttgctgttatacaggccgatggtcttgatgtattcggacaggccttccacacccagggcgtaaatcgcggcgggtgtattggccacggggtacaacttcgccgtggccttgttgacgccaacgtccgtggattgagccgagaggatcaccgcaatcagtaactcgaacggtgaggagtaggccaattcggttttcggttccggattgtcttcgtgaaacctgcggaaaatttccaggcgttttgcggcattcataggggcaggcgtttccttgcaggcggtcggcgtgatgttagcaatacacagtgcagtgggtcagccgttggcctcggcatcctgcagcgtttgctcggcggcgttcaatgcggctttcaaggttgcgatttcatgcgcatcagcttgctgatcctgagcctttttcaacgcagcccggcgcatggccaactggatctttgcgcgcttgaactcggtacttttagcggccgtctttggtggctgcggtgagctgttggcctcaagtgcggcaagcgcctgctcggatgcctcgaactgtcgatgcagcataatcaattgcgactgttgctcaaaggtcggcggatgcccaaacgctttcaaggatttgtgcaactgcgcgcgactcatggcgacgttggttttggcctgtttgatcgcggcgtcctgagcggcctgagagtcatcgaccggtgccaccgccatcggcgctgtgcgcttggcgcgtgccaggcgttcggcgagcttgcaagcctcttcacgttgcaggcgggcgttacgttgttcgaagcgccgccgcgcccggttgcgtttgaagtcgcgtgcacgccgttcattatcgttgctggccaagtcaccgacgataggcagaacgtcagcaagcggacgcatctcgatacagtcgacagggcagggcgcaacacacaggtcacaaccggtgcactcgtcgacaatcacggtgtgcatcagcttggcggcacccacaatggcatccaccgggcaggcctggatgcatttggtacaaccgatgcattcggcctcgcggatataggcgacttgcgcaggcgcatctccacggctcgtgtccaggtccagtaccggcaggcgcagcagttgtgcaagcccgacgatggtttcctgcccgccgggcgggcacttgttgatggcttcgcctttagcgatgccttctgcgtaaggtttgcaacccgggtgcccgcacttgccgcattgagtctgcggcagcagcgcgtcgatacgttgaatgaggttcatgctgtgatcatagcgttgacgcccggcccagggagaagggcaagctgagaggccccgccgtagcaacagcggggcatttttcagaggttacttgatgcgttggcccggcttcgcgccgctgtccgggctcagcaggtagatttcttcgccgccagggccggccgccatcaccatgccttcggaaatgccgaacttcattttccgtggcttgaggttggcgatcatcatggtcaggcgaccatcgagcttggacgggtccgggtaagcgctcttgatgccggaaaacacgttgcgctgttcgtcgccgatatccagcgtcaggcgcagcagcttgtcggcgccttccacggcttcggccttgatgatcagcgccacgcgcaaatccacggcggcaaaggcgtcgaaatcgatttccggggaaatcgggtccttggccagctcgccattgcccgccggcgcggattggccggtatcggtctggctggcgaccaggtcttctttcgaagcgtcggtcatggcctggactttcaccgggtcaatacgggtcatcaagggcttgaacgcgttcaactgatgattaccgagcaaggtggtgtgatcgttccagctcaacggcgccacattgaggaacgcctcggcatcggcggccagcaacggcagcaccggcttgaggaagatcaccaactgacggaacaggttgaccccggtggcgcagatagcctggacttcagcttccttgccttcctgcttgttcagggaccaaggcgccttgtcggcgatccaggcgttggcgcggtcggccaggcccatgatctcgcgcatggcgcgggcaaagtcgcgggcttcataagcgtcggcgatgctcggtgcggcggccaggaaggcgtcggtcaactccggtgcggcgttctcggctaccagtacaccggcgttgcccttgtggataaacccggcacaacggctggcgatgttgacgactttgcccaccaggtccgagttgaccttctgtacgaagtcttccaggttcaggtccaggtcgtccacaccacggcccagcttggacgcgtagtaatagcgcaggtattccggcgacaggtggtccaggtaggtgcgcgccttgataaaggtgccacgggacttggacattttctggccgttgaccgtcaggtagccgtgcacggcgatgccggtcggcttgcggtagccagagccttcaagcattgccggccagaacagcgcgtggaagttgacgatgtccttgccgatgaagtggtacagctcggcggtggagtccttgccccagaacgcgtcgaagtccaactccggggtgcgatcgcacaggttcttgaagctggccatgtagccgatcggcgcgtccagccatacatagaaatacttacccggctcgcccggaatctcgaagccgaagtacggcgcgtcgcgggagatgtcccactgctgcaggccactgtcgagccattcggagagtttgttggccacagcgtcctgtaaggtgccgctacgcgtccaggtttgcagcatttgctggaaatccggcagcttgaagaagaagtgctgcgagtccttgagcaccggcgtggcgccggagatcgctgacttgggatccttcaagtcggtcggtgcgtaggtcgcgccgcatttttcgcagttgtcgccgtactggtcttcggtgccgcatttcgggcaggtgcccttgatgaaacggtcggccaggaacattttcttttccgggtcgaaatactgggtcaccgaacgttggtcgatgtgcccggcttctttcaacctcaggtagatctggctcgacagctcgcggttttcttcggagtgggtcgagtggaaattgtcgaagtccaccaggaactcggcaaagtcggcgctgtgttcagcctgcacattggcgatcagttgttctggggtgatgccttccttttcggcgcgcaacatgatggccgaaccgtgggcgtcgtccgcgcagacataaatgcattgattgccgcgatgcttctggaagcgcacccacatatcggtctggatgtactcaagcatatggccaagatggatcgaaccattggcatagggcagggcgctggtgacgaggatcttgcgtggctcggacatggggctcggctacttgatgaaacggaggtcggccactataaagcgccgggaaatttatttcaccccgtgacgctgtttcagaatcttccacgccttcgaaagcatgccgttcagcggctggaacggttaggatagccgcctgtttcagtcagtcttttttcgggagtagcccatgagcgccgtcaatcgcgcagcggtggaagccgttcttcgccagtacaccgacccttatttgaaccaggacccggtcagtgccggctgtgtgcgtgccatcgaggtccagggcgaccaggtgtcggtgcagttgcaactgggttatgccgcgggtctgttcaaaagcggttgggcacagatgctgcaaatggccatcgagggcctcgacggtgtgggttcggccaaggtcgacatccaatgcgtgatcgcgccgcacaaggcccaggcgcagatcccgggcctggccaacgtcaagaatgtggtggcggtggcgtccggcaagggcggcgtgggtaaatccaccaccgcggccaacctggccctggccctggcgcgggaaggtgcgcgcgtgggcattctcgatgccgacatctacgggccgagccagggcgtgatgttcggcatcgccgaaggcacacggccgaaggtcaaggatcagaaatggtttgtgcccatcgagtcgctgggtgtggaagtgatgtccatggcgtttctcaccgatgacaacacgccgatggtctggcgcgggccgatggtctccggcgcgttgctgcaattggtcacacaaacggcgtggggtgacctcgactacctggtgatcgacatgccgccaggcaccggtgacatccagttgaccctggcgcagaaagtgccggtggccggtgcggtgatcgtcaccacgcctcaggacctggcgttgctggacgccaggaaaggtgtggagatgttccgcaaggtcaacatcccggtgctgggcgtggtggaaaacatggcggtgcatatctgttccaactgcgggcatgccgagcatctgttcggtgagggcgggggcgagaagctcgctactcagtatggcgttgaactgctggcatcgttgccattggcgatggagattcgtgagcaggccgatggtggcaaacctaccgtcgcggccgaggctgatgggcagattgcgatgatctatcaggagttggcccgtcatgtcggtgcgcggattgtcttgcaggaagcgacggcaccggcgatgccgaccattaccgtgagcgacgattgattaggctgtaacggatacgcgaaaagcctgacgacccgtggtgctctcgggtttttcgcgagcgagctcgctcctacaggtggggtgtgaatagggcttgttgctactttgcgtaatgcgcgtgtaagcattcgcttactttttcgtaagtgtttggtttttttggctgttgcgtacgtcttgaaatgacgaagctattatctatcttattgaaagataacgattattttcgcgagtgagagcggtagagtttgtcagaccgctgagggcatcgcgttgaacttccctcggaacgctctaacatcagccctgtgtccacggattggcacagccatcaaggaacgatggtttgaaggaacgtcgcaggatgcgattcatcaggatgatgaaaaggaatacagggactagggaaaaaatgtgggcgggtcataccgcccctttttttgcctgtagaaaagtgaacccaggcacccgaacgcaaaaaaggccctcaagggcctttttttgttgggcagtggcgctttagcgctctagttgctcaatcttgttgggcttgccatcccattcggcggcgtccggcatcggatctttgcgctcagtgatgtttggccagatgtctgccaactcgacgttcaactgaatgaattgctccatgcccgcaggcacttcgtcctcggagaaaatcgcgacggccgggcattctggttcacacagggcgcagtcgatgcactcatccgggtggataaccaggaaattcgggccttcgtagaagcagtccaccggacagacttctacgcagtcggtgtacttgcacttgatgcagttgtcggtgacgacgaaggtcatttctaattttctcctcaggcggcggcagcgaaaccccttatggtggggttcgcgaggtttgagagcgatagtctgcggaccaggctaaaagcccgcagcatcccaaaccgcgcgagattctatcagcttgcaagcgtctgcgttatatccgagtcttcagtgcatataacatttcgagcgctttacgcggcgtcaagtcatccaggtcaagctttgccaactcatccagcaccggatggggcaggctggcgaacatatcgctctgatgcggcgcggcaggtttcttgctggccttggccgggctggcgaccacggtttcatggggcagcgccgtggtttccaggcggcttaagtgttcacgggcgcgggtgatcacctcgttcggcactccggccaattgcgctacggccaggccgtagctctggcttgccggccctggcagcacatggtgcaggaacacgatgcgctcgttgtgctcggtggcattgagatgcacgttggccaccagcggctcgctttccggcagcaccgtcagctcgaagtagtgcgtggcaaacaacgtgtacgcacgcaaatgcgccaagcgttcagccgccgcccaggccagggacaggccgtcgaaggtgctggtgccgcggcccacttcgtccatcagcaccaggctgcgctcggtggcgttgtgtaggatgttggcggtctcgctcatttccaccataaaggtcgaacggccaccggccaggtcatcgctggagccgatccgcgtgaaaatgcggtccaccagggacaactcgcaactggctgccggtacgaagctgccgatatgcgccaacagcacgatcaacgcggtctgacgcatgtaggtggatttaccgcccatgttcggaccggtgatcaccagcatgcgggtatcgtcgtccagcgacaggtcattggcgacgaacggcgtggtcagcacttgctccaccaccgggtgacgaccttgcacgatgcgcatgcacggttcgctgacaaaccgtgggcaattgaggtccaggttcagcgcacgttcggcgaggttgctcaacacatccagctccgccagggcggcggcggtgtcttgcaacggcgccaggcggctgatcaagtcctcgagcaaggcttcgtagagcatcttttcccgcgccagggcgcggcttttggccgacagcgccttgtcttcgaatgctttgagctcgggggtgataaaacgctcggcgcccttgagggtctggcgacgttgatagtcgataggcgcagactcggcttgcttgctcggcagctcaataaagtaaccgtggacacggttgtaaccgaccttaaggttcgccaagccggtgcgggctttttcgcgggcttccaggtcaatcaggaactgcccggcgttttcgctcagggactgcagctcatccagctcgctgtcgtagccggttttcaacacgccgccgtcacggatgatcgcgggtgggttgtcgatgatggctttttccagcagcgccgcgaggtccgggtacgtgccggcagtcaccgccagctgttgcaggtgcggcgtatccaactccgtcattgccagttgcaactgcggcagggcgctcaaggcatcacgcaggcgcgccaggtcgcggggccgcgcattgcgcaggccgattcgcgcgaggatacgctcgatatcaccgatttctttcagttgcggctgcagcttttcgaagcggtagccgtcgagcaggcaggtaatagaggtttgacgcgcttgcagcacggtcaagtcctgcagcggacggttcagccaacgggtcagtaagcggctgcccattgcagtctggcaacggtcgaccaccgattgcagggtgttatcgcgcccgccggccaggttggtatccaattccaggtttcgacggctggcgccatcgagcaccacggtatcgtccagccgttcatgacgcaggctgcgcaagtgcggcagggcggtgcgctgggtttccttcgcgtagctgagcaggcagccagcagcgccgatggccagggtcagcgtttcgcaaccgaagcctttaaggtcctgcaccgagaactgctggcacagacttttcagcgccgaatcgcgctcgaaatcccatggtgcacgccgcttggtcccacgacgtttctccgccggcaagtccttgggccaatcatccgggatcaacaactccaccgggttgatacgctcaagttccgccagcaggttctcccagcccttgatctccagcacgctgaaattgccgctggtgatatccagcaccgacaggccgaacaaacgctcatcgcccaacaccgccgcaatcaggttatcgcgacgctcatccagcaacgcctcatcactcaccgtacccggcgtaataatgcgcaccacctggcgttccaccggccctttactcgtggccgggtcgccgatctgctcacagatcaccaccgactcgcccagcttcaccagcttgaccaggtagccttccagcgagtgataaggaatcccacacatcggaatcgactgccccgccgactgcccgcgcgcggtcagggtgatgtccagcagcttggcggccttcttcgcgtcttcatagaagatctcgtagaagtcgcccatgcgatagaacatcaactgatcagggtgctggtttttcaggcgccagtactgctgcatcatcggggtgtgggaggagagatcggaaattgctttattcatcagtgacttagcgctatctgttcagaggtcttgggcgaaaatggggcatttcatcagttagaattttgatgggggccgcgccaccgcttggttggacgtatgcataaaagactaacacagggtgagcaactgctcactcggtgaacgccatccagccttggcgaaatgtatggcggtgtgctatcaagctcgcagatcattttccgcaggcaaaaaaaaatgaaagcagcttttccagagcattttgtaggggagcccgagcgacagaagaagctatgggcggattgcatcttcgtattggacacaaatgttctacttgatctttatagattctctgattccgcgagagatgctcttttcaaagttatggagtcgttaggggatcggttatgggttccttatcaagttgcttatgagtatttcgaaaatcgtctaggtgtgatcgaggatcagtctgatgcatatgctaagtctatttctgggctaaaagccgcgaaagaaaaatttaacgcaggtacaaaacaccctttcgtttctgatgatgtttttagaacattcatatcttcatatgactcaatgattgctgagttagagagtaagaaggatatttataactcttttgtaactgttgatcttgtaaaggaaaggatcggggaggttctgtctgggcgggtaggtgagccgtattctgaagaaaagctaagtgagttagcggtggagggtgagagtagatatttagagaagatacctcctggatttcaagatggcgggaaaatgcctgaagctactacgactaagtttaagctcaaaaagtttggtgatctgattttgtggaagcagttaattgatcatgcagtgcttaaaaataagtctgtgattttagttaccggtgaaaagaaagatgattggtggcttaagtcagataagctattggtaactgccttgccagccctcagcagggagtttatgagcacggtaaaacaagatttttatctttattcgactgatagatttttgcttaaagctaatgaatatctcaaacaagatacttcggataatgttatggaggaggttcgcgcaatcaacaaggctgacgcggacaagatggatggtttgagaggtgagtttttagaagactcgttagaagattcgtggtcccgtatagctaccttgaaggggtggcatataaaatatgatgccgatattctttcttcaaatgcggatgagtatgtgagaggctcaacctctcagtcgatagcaaatgaaaaggaagtgattttgcaaagagcgaaagctctgtcgtcatatttagagctttatagagctgagcgtggcgagctttcccttgctaaggccgcgttaacttcggctggtgtccccttagatgatgaacgcgttgttgttgctgataagaatctattcagagttgatggtgctatagattcgtatttgcatgagtttagattgctgcgtgctaaaaagagaactttgaatgcccttgagagaaagctgtctcgagacggtttttagtgtttcgcaatgttgagagattgccatattttttcaagctcttttggattcatcatccatccattttgcatatacctgtactagcattgtgaagtctttatgacccatctgttttgcaatgaatgcaagatttcctcgggctgttaaacaccagcacgcgtatgtatggcgagtctgataaggtcgtctggggcggatgcctgatcgtttctggattgctgcccatttggtattccaagcggtggggacataccagaaatttataatcttcttgcgcgcctgggttgagggggagagtactggggtaacactctctttccggctctcgtgcctgttctggaacacctcgatgacgcgtgcaggatgatcggcaactagcgacagcagtaccttgcaggcttcgaccgctggtggcattaataatactgagcgcggcctcccggtcttaggtactttgaacgtgccgttggctgttatggcgcgggtgatgttgatctgtcctgcgtccaggtcgatgtcctcaacagccagcgcacatatctcacttggtcgaagcccggtatacacggccaaagtaatcgccgcagcgtcctgggggtgaaggcatcctttatcaaccagcagctggaattcgtcacgagtaagcggatccggctcttggccttgcattgcgaaccgattgcacgcttctgataatcccttgcggcagtatccattggtctcgcaccagcccaggaaaccggcgaacgtcgccaggtagtgattgacggtgctcgatctgcaatcagcaacgtccttagcaactgaatgtcttcgggcaacaaaactccggcgagacgatcaattccaaccaaggcagtgcagatgtctaaggcatagccgtacttctcctcggtcatgggcgtgatgtcgactgccttcaacggcttgtaccgttccagcaacgccccaagcctttcgtccttggcactgctgtagttggtcgcgtgctttgagttaggaaagtgccgtccatattcaaaatgaccggttttgatctcgtgaagaattgccgcccttaagagggcggcgtgtttgatattggctttggtgatcggaaggccgaggggttcgcggcagcgtatacgccgccacatgaacacgacgcgcaaattgccgccgtgtatctcaatccccctgtgctttgccagctcggtttctaggccgcttcctgaggtgcgctctcggcccacttgtcatactccgtcatgttgattgcaatgcggccgtccggcgtcttgcgccagatgcggccttgggcccaggtgccgtttttcactttgtggcgaatggcgtcttcgctgtagccagtaagttctgaggcgcggctgatcattacccagcgtggaaatctcatatttttcccctccacaggctgctgtcatgcgacattgagcggactgacagtgggtattgctcaaggccacccccacgtcggtgagcaggggcgctactcgcaaaacggggataaagggaggctaatcggtgcacacgttccaagtgaaaagtatcaatgacatgttattgaagctggactgggagataagtcagctgcagcgcagttacatctccaatgcggtggatagcctttccacgtcgagttattttgcaatcaacggcgccctcacggcgttccatatttgtgactggatctggcacagcggaaatgagtcgcagcgtgcgatttggggaaaaggtcagaaggtaggggagcctaccaagacaaacttccagttgaatctgagagatgcttgcccaaacctcacggtatgtcgtgagatcgcgaactccttcaaacattacgccccagatcgtcataccgatgaagcggtcaagcctgcctccgtttggtttacttcttttccggcaagggcagggattgcacgagcaggggacgcgttgaactctccggctgcagtagtgatgatttccaatggcgtggatacgttgcctgttgctcacgtcctcagcgtcgtccatggatacctggaggacttctgtgagaaacatgggcttcttggctaaattaatggttagggcgagagcctttttaccttcttcggcaggatgcgcgagcggccgtttctgatcggttagcgttgcatcactgagcgctgccccgcgcagcttttcgcgggatataactgagtcggcattttgaagaataaatctgttccctgtgttcatttttctttagttatggcttgcgatgcggcagtacggtgccgatgaacaagacggtggggtaccggatttactcagattgatcactagaaagcgtgtcggaaaccgaccgggacgtattgagcctcccgccatcaaacgaagacccaagcctcactggatgcttatgcaaacgcgttccgcggtaaggattgaggtcaggaaaaacggacacccgaaaaaaggttaaataagtgccattcaaatctgtcctctttttgaatcagcgaagccttggtcattggactccattcctatttacttgtcggggtacctgaacctatagagctagctatgcaggaagaatcgggatcatatgaatacctttgggggatgggtgtgctcgacgcggcttgctagcgtttctccgtatctatgttctttgaaagccccattgaacccattgggccgtttagatcaaatttgaaattcgagcagtactccactagacatgatgatgtcaaaatagtagccttgcgagttggcgtatgcttgagaatggttttcaagttgaaagccgcaagtagtttaaatgtccttggtaatgttggtccaaaattgtgaggctcgttgttctttataaagactgaaataattagtctgtgcacaacctttgttggttgggggctgagtatttattttataataattaatctattgattggtcgatggtatggacgtggaacttacattggatacaacggaaaaagttgtgtcgttgatagttgggtgcttggctatagcttcttatctttttgtgaaaaataaagtgtcgggttcgaagtcctctcccgaggtactccctgtttctactggtggcgaggctcataattcactacaaaactcaaatactaataatttaacggtaaatgtaagtcctgctgctgaatcagttgctgactcttctccgaaaacggcagatgcgatttttgatatttctgcattaaaaagaaagataaaaatactttttattgatgatgatcagggatttaaaattgttggtattctcaagaagatggggtgggagaatactagaattgttgaagatattaactcactcgaagaggctgtgctatctgatgctgatgtggtatttgtagatattcaaggtgtggggaaatcaatgttctacgttgacgagggtttaggccttgctttggctattaaacgtcgttatcagaagaaaaagataattatatattcagctgaagaagaaggcgcgcgttttcatgatgctctacaagaggcagattacagcttgcctaagacagcagaacctatacgttttgaagaaactattgttcgagtgctaaaaaatggctgagcgatttgctagggtagctttgtggtcgcaggagcgtgccgaaccatttattaaccagctaggagagtatttgcaagtatgtcaatctgaactccctgcggatgggtccaaaattattcggttggatggtaaagttacgcgtctgactcgcaggtctgagcaagggtataccgtaattgcagcttcttcagatacagatcgcctcaaaagtaagaaattgatggacttagaggtgaatgttgttgtactggctgcccccactattgatgcttccactaaacatgctgaacagcgcagtcgtaggttaatacataacctgaaaagtttaactgcgaaaacaagtcaagaaattttctacatagtgaagcaagagatgttgctctcttctcctagagaatctattgagtatgtttctggggaggtcagagataactctcaggatactgcaagagcgattattgaaattctgaagaaccaacttgctcaaaaggccgaattttctgcgttcgaaaagctctctggaaaagttgggtcaatgaaaatggaatcgcatgatgttcatcgcgtactgatgaatgttttttatctattttttggagagttccttgcgaagaaagtaaaggcgtatgtagagccgactaggcttcaagccgtgtttgattacgactctattcatacctgtatatattatctagttgagaatgctgtaaaatatacaatgcgtaacagtgttctcaatgttataacctcagaagacggaaatggttatatagatattcgctttgaaatggaaagtctagctattgctccggaagagcaaggtcgtgtgtttgatgaggctgtgtcaggaaaatatgctgtgaatgagaagctaagtggtgccggtattggtttgttcttagctcgcgagatggcgcgtttgaatgaaggcggtctatatctgcatgctggcagacctatgattagtgatacttatgctcgaaactcatttgtacttagcttaaagtctgctggataaggttgtgcatattttggtactgtgtaatgacgttcccgagcgaatttctaaaattagttctttgatttttgagttctaaaaaacagcacggatttatttttgcttattgaacgccaaggatacggaaggcttaggttggacagttgtgagccagagtactgggcggccacagcttcatgatgtcggatgctgccgtgattgaaccgcgagtggcggcgcgttattccacgtgcggatggatagcttcaccgagaagggctcttcagcggcgctgagcactggctcgcagcgctatggagtggaggagtttggtgcttgcgtttaccgtcactggcgcttcggttgcacgtgacagatacgaagccagccttggcctgaattatcaagtgtcggtgctgacggtgtgcgctagctatacccgccaagcgcgtagcgggcttgatgttaacggagtgatggtcaaggcgcgtacgcgttttagggggggacgcgaacgggagctcttgcgagcccctgtcatccccaaaaacaataatcttttttcttgaaatttactcgccgatattttgggttttttaattttaactcgacgtttattcatagtacccaccctaatacgcaattccccgccccctttctttgtctaatattggatccagtggccactgaggcccaatggatcactctgttcaaaaaaaggagaagcgacatgatgcccaaggatccgtcgaacagtggccgacctaacctgctcacggattgctgagatgaacgtactgtctaggcctgaaacagatgtaaacctatttcaggactgtacatagtggcgcttggaggagtaatgatacctgctgcgcagcagagactgttcgtttctagtatgtcgctcctatttgcagtacggagtaacgcggacagggcgccggtgttgttctgtcggttctcggctaggtaaaaacacaaaaagaggcgacgcatttattcaaatgcgccgcgctcctcttcctagctacttactgaatgttgccgggcgaatccaacaccttcaccacatcatcaactaccgccttgaccatctcctgcaagtaatgcgacgcccacgcataacggtccgtctccttggtcatcgccgcatcttctgcgagcagcttggcgacatggagaagatcggaggcgtggtgcagggcttcttgcagggaaacaccgctgttgacgcggaatagaggttggtcggagtgaaaggagaagggggtgacgccgagggtggttaacgcaggcggatttgtagcggtcatcggtaaaactcccatatcaagtgagagctaccacgttcgttatcaggcgaatggggtggcagctgtgcgcaggctgataaaccggagatacaggaacccggcagacccgaaggtctcccacgcacagccgccattgcacgaaatgaggggcgaaaaaaaacgcctgcaaatcgggtttggtggcgcttgttgcgcctgcatcttgacgggttatcaggcccggtcgctgaattggcagcgacgaatggaagggtagcgtggtgatagggagggtgcaactgggaaactgtgtcctggaaataaatgcgtccgcttttctccagtaggcagcattggagaaacacgcctcctagaacgatgtggcaggtaatatcatgattcgactagtttgaacttcgcaacctggaaaatttatgacgagtaccctgaagtatcagattcttgctgggctaccgggcgaagggcctcttcctttgcagttcagcgctaccggccaagggcaccatagtgaaggattcgtcatcaggttctcgccagaggcgaagccttcttgggtggggaattttcaaccgggtttttgccgcttcagttgtgttctgacgctgggttcaacttttcatgtgatgatagttgccggtggtcagggttatatcgtggacattcgtagcggctttctcttgaagcatttcggtggcgatatcgagtacttggtcagcattccagaattagacagcatccttgtttcaaatggggtgtggctcaggcttgttaaaggcgaggctgaggtctggtgctctgagcgcctgtctctggacgggattagaaatatccaaatctcgctcgcggatgggatcattacaggggagggatggtatgtagacgattgctggtatccgttcaaagtctgcatctcctcgggtgaagctacgggaggagttttcgagtcgcttgacttcagctaagtccatttctgcgtttctgaatgattagctaccggccgctctggaagcagttcgcgccgaatcaccaagcagtaacaccgccataactcagcgattcatcgctctgatcactctttttttccagcgccatttttacaatctgtcacgttgggataaggcaggcagaccagaatcattttactcttcggttcaaagccgatgcgatcaatgccgggaaggtgatgatctggctttttcgcagcatattaatccttcaaagttggaatgactgcgcggtccaataggctattttgacctacgcccactagccggaaacaaccctcggatcaccccaagaaacgccgcaaacagattgattgaagtcgccgtagtgatagcaatcaacacattgtccgagaacggcgctttgcccgagtaatacgtcgaccacccattccacaccagtaaaaccgcccagaagatcacaccacaagcggcaaaccaaaacgcccgacccgcatatttcttgcgcagttgcctttcggccttctggtctttgaggttctggtttctttcatcgtcggtgcctatggcttgctcgccaccggcttgggtgtcctggtcaggccctgccgcggggggcagggtgagttccaggttgtcgagttcttcactcacggatgcggctctttgggtgaatgagtgttgccatgtcttcccagtcgatggcggaaccgtcggcgcccttgagggcccaggctgtgccgtcctcgtgggagaggttggacaattgggtgccagaccacttgccgtatttgttgatgatccggtcaatcaaacgatgggtgtaggtgtcgctctcaggcactctcggtgtcacgaacacaatatcttcggcgtcgggcttcagattgctgagcaacgacgtcaccggacgattaccgtaggatttcaactcatggtaaagcgacgggatgaccggaccatattgccagcgggcaaagtgatcatccataaggggctgatcccgttcgcgcaaatgccaggactgcgtataaaacagcagtttttgcagcttcatgggcgtcaggcccgaaagcttgccttccttcgcacgttcaatgaaggcgttagcgacagctagcgctgaataagccatgagcacctccgtctttgctggctacgttgtcaaagagttttatacataggccttgagttgtcgacatgcaaggtgttgtcgtgcggcaatatcaaggtggcgcaataatagagttcaaataactggtttcatatacagtattttgtttcggggtaattgaaatttgatgtttaatgcataaatatgcaaattagcatttgccaaccccaaaaactcccgtcactatccgcgctatgcaaaaacgcaacgtttctatcgtcttaagagaattgctggaccgcgaccggatctcccccacggagcttcaccgacgcactggcgtgcctcaatccacactgtcccggatcctcagcggcaagatcgttgatccgtcggataaacacatctcccgtatcgccgagtattttcgcgtgagcactgattacctgcgcgggcgcgcagcagtgggcgctttgcgcgatgacgggcgcgacccgatgcattcggaactcaaggacataagcctgtgggacgacgacacccccgttaatgatgacgaggtgtcgatcccctttctgcgcgaggttgaattggctgctggatcaggaagattcgtcatcgaggaaagcgaaaaggccagcctgcggttcggcaagcgcagcctgcggcataacggtgtgcagttcgaccaggcaaagtgcgtgacggtgcgcggcaacagtatgttgccggtgttgcgcgacggggccacggtaggggtgaatgccggcaagagcggcattggcgacatcgtggatggcgacctgtatgccatcaatcacaacggccagttgcgggttaaacagctctaccgcctgccttccgggattcgcctgcgcagcttcaaccgtgatgaacaccccgatgaggactacagcttccaggagatccaggatgagcagatcagtatcctcggtcatgttttctggtggggcatgtacgcccgctaacctccacgcgtaagaagaaacccgcccatgtgcgggttttttttcgcccctagaaaaccggccaagcccaagcccgcaaggcttccaatgcattcgtgcattttaagggcaaaaataaatgcatctgtgcattgactgtatatgcatacatgcatattcttcatctcaagccagccaacaaggcctggtggaggcggcaaggatgctgccaaggaagacaaggaaggcacgcaacatcggcaaggacgccatcgaagcgatggcagggatgccaggcaacaccggcaaggatgccgacgctctttagtttcaacgcttcaacaacaggcagcgatgaaccggccttaacggttcagagggttggcaactgacccgggtgtgcagcgtaaagcaccagaagcagttatccggcagacagggatcgtggtcggaaaaacattgaggaaaggaccgtaccgcgccagtagcgccgaaagtccgaggacatcattactgaaaagcccgggcgaccgggctttttggaatgcctacctatccaagcatttgtaaatgaaatacggactatttattgctcagccaggaggcgtgacatgacaaatgaacagcaagcgttagcggaaatgcctatctggctggtcatcatattggcggtgatcggcggggtgtcaggtgaaatgtggcgcgccgataaagaaggcgcacgtggctggtcgctgatccgccgattggccctgcgttccggggcgtgcatggtctgtggggtgtcggccctgatgctgtgctacgccgccggcatgtcgatctggaccgccggtgccattggttgcctgaccgccatggccggtgccgacgtggccatcggcctttatgagcgatgggcggccaagcgcatcgggatcaaccaaggctctggccaggacccgcactaatcgttgcaaggacgcgacttaaaatgacgtttatcgaaaagccatcccaactgccccaagccatcggcgcggtgctgcatgcggccttcccggacatcaaggtcggcagtcaccaagactttcaaggcgatgctgaacaaaccggcgtaatggtcacggtcgaaggcaatggcccgggcattcgctctcgcgaggggcgcaaggcccacgtcctggccatttcacttagggccatggtcgcccccggtgcattgccgttcgacgcctgcgacctggccagccagctcatggacctggtgctggataaccgttggtacctgccccaggcgcagtgcgatttgccggcgaatatcgtcgcggctcccgctgtgcgcacttccgtggaaacgggctacgacacctggacggtttccttcactcaaaccctctatctagggccgacgttactcgacgatcccacaggccaaccgctatttgcctgcacctgggacgtctccaacatcgacgacccggcccaatacaagccactggcggagtagcccatgttcgacgcgctgttacgcatgcaattgggaccgatcgtcgaacgcctggccgagatggagtcccagctcgaggacctctaccgccgcgccgagagcttctgtcggatcggtatttgccagcaggttgatgcggccagcaacacctgcaaggtcagccacggtgacctgctcaccccggcgatccgttttttcaaccccagtgccggtgcacaaaccgaaacccgcatccccacggtgggtgagcaatgcctgctgctcaactacggcggaggggagggcggtgtgcaatccgtggctctgttcggccttaacagtgatcgcttcccgccggtctccaacgtggcaacgctgactcggcgccggcatcaagacggcacccaaagcgactacgacgacgccagccacaccttcaactgggtcaatggccctaccaccttcagcggttcccgcgaacaggttgacgtcaaggtcggcgccgccagcctgaccctcagcgcccaaggcatcaccctgcaagtcggcggcaccagcctattgctggatgccggcggcgcgcacttcagcggcccggtggtggaccatcaaggacgcgtcatcagcccccgataaggacaccccatgctcggaatcgataggaacaccggggcggccgtcgacgactggctgcaatttgtgcagcgcgccacccgagcgctgaccacccccatcggaacgcggcaaaagcgcccgttgtacggctcgctgatcccgcagttgctcggccagaacctcggcgacgacctgttgatcctcgcccagagccacgccgcgcaggccttctacaacacccacaacggtatcggcgacttcgaccctcaggtcatcgtcgccacccgccaaggcgccggcctgctgctgcggtttgccggcacctggaaaaaccgccaacaatccttcgaggtcgtgacatgagcatgctgatccccggccagaaccaactggcggaaccgaccatcatcaaggtcgatgagttcgaaccgttgctggccgaattcaaagcgtttgtcatcgactatgtcgccacccgcgcaccgcaaagcgcggccaaactccaggtcagcctcgacaacgaaagcgaactgctgaccctggctctggaagccttttgcgtgcgcctgcaaacccatgagcgcaaatacaacgcccgcatcaagcagatgctggcgtggtgggccaccggcagcaacctggatgcgcgtctggccgatatgggcctggaacgccaagtactcgaccccggcgacccggccgcgttcccgccggtgccgcccaccttggaaagcgacgacgacgcccgcctgcgttactacctggcgccccacgccccagcggcgggctcgcgcatgcagtatcgccgtgaagtgttcaccttgggcgagcgcccagcagtgaaagtgcaaagtgcgacgcccggtgtggtcacggtcacctacaccttcgaccccgacggttacgcggcccaggtcaaggacggcaacgctcgccgcaccgcaccgggtgaagtcatggtcaccgtgctttccagggaaggcgacggcacgccatctgccgacttgcttgacggtgtacgtcgacatttcgcacggccggatgtacggcccgaaaccgacctggtcagcgtccagggcgcgcagattcaaccctacaaaattcgcgtggtggccaagatcaacgccggcccggactcggggctgacccaagtggccgcgcagaaactgctgcaagactacgccgagtcctgccaccgtctggaagggcgggtggaccccagctggatcgactacgccatccacagtgccggcgctgcgcaattgcacatcctggaaccgttggcgccgattgccagcaccgcgttccaggccccgtattgcacgggtgtcgaggtggaggtgcgcacgctatgagtgaacccaacgcaagtttgctgccggccaacagctcaccgctggaaaaggccctggacctgggcttcggcacattgcttgagcgcgtcactccgccgtttccggcgctgatgaacccgctgcacacccccagcgaattcctgccttacctggccgcagaccgtggcgtcagcgagtgggatgccgaggccagcgaggcggaaaaacgcctgaccgtggccttgtcctggcagatccagcgccaggccggcacacccaaggcactgagccatgcggtggagtcattgggcttcacgcccaatatcagcgcctggtaccagcaacgtccgctgggcgtgccttacaccttcgacgtgcaggcgatcatcggacgcagttggtccagcggcgaccacaaccggctgatccggcgtatcaatgcggccaagagtgagcgcgatcaggcgacgatcaccatcgtgcatgagaccgaaggccagctcgcgctcacgcaagtgctcgacgcgcctttaagcgacggtgagttctacctgaacggcgcgttgccggaattgtcgctggtagctcggctcaacagtgccggggttgcccagcactacaccattaacgattacgacctcagggcgcagccatgacagatgaaatcacgcgcctggtgcgcttcacctccaaaggtttggatgaagtgctgcaggcaaagaaccagggcctcaaaggcgaaatcacccacatcggcgccggcaccggccgctacaaccccgacggcacggaagtggccttgcgtgacgagcgccaacgggtggccatcgtcgattacgaagacctgggcgagcgccaactcaggatggccgcgctgtttgacggcgacggcgagtatgagattggcgagttcgggttttacctcgccagcggcaccttgctggcggtgtattccgtggcgggtaagttgctgacgtataaagcggcggcggcgcgggtgctgcagaagtttacgctggatgtttcgccgttgccggcggatagcgtgacgattgtggtggggaatgacaatttgaatgtgctattgactgatgaaattgcggccttatcggccgcgagcatagacaatatggcacgcggtgtaggggttctatttcgggtgatggaagtcgaaaagaaatagggcgtttttaattgaatttacataacgctcaccaagcgtttaggagcatccatttgagtactgaacagcaacttgctgccgtcgttagtgcggcaaacaacttgactaatataattaccggaaaagtcggagaaattgacaaggcgatagccgatgcccgcttggcgtatgacgcacaattggcggagttgaaaaatagactcccaaggttagcggtcaccaagaacttcaatctttcccccaacgccgacggaacactgattgaaaattgggggattcatgctgaagtgacgcccactaagctgcgaactatcacccctgtttctcaagcggccggacgcccgcaagctgatgtagatttcatgctccaagtgcaggcagatgtgcgtgaacaatatccaagctttgaaatcagggcgagcgactattggcgcacgtttgtatatctgtggcaaatgaagtggtcggtgtcagacgttagtccttggcttgcgttcccatacacggtcgatatggcgctcgcgaatggctctggtgcagtcccgcagaactcctacctgacggtaggcgccttcgtgcgtcttttggaaggtaacgtatcgggtgcatggagtaatggtgttgagaaaggcaaatggcgctggtgttccagtgttatttctcctactgaactgtttgggagttattaccatctgcacccgatgcgcacctcatccactggcgttgttgaggtgatgctggcaggggcttgcacaggcgttgtaaccaacccaggtgattggggaacgatgttggctctaggctgaggagaaaatatgaaaccgctatttgtacctgctgaactgcatccgattatcaagtgggaaatgatccgtaaggcaagggatcaagacttgtcggcgagtgattatgctgcaatgccagactatccgatgctcgaaagccataagcttatcttcgctgagtatcgtcaaaaactgcgtgatattccagatcagggagaagatccagacgcagtgctctggccatccaaacccgattttctgaaataactgattaccgcgaaagcagttttttttcgcctccccaaagcccctccccgcaggggctttttgcattttcccacccggagatttccacccatgcccacctgccaaacctacaccgtcctcatcccattccccatcggcaacggccattggtccaccgctggcgaggagctggaactgctcgacgtcgaagcatccgccctgcgcaccgctggccgtctggaactgaccagcgtcctcaactccacccccaagaaggctgaataaccatggcagaagtcctgaacttcgagcacaacggcatcactgtgaatgccactgaatcccccgaggccatgggtggccttggcgataacgtcattggcctggtcggcactgcgccgaatgcccacgcgtcgatccccaaaaacgcgccgtttcgcatcaacagcttcaccacccaggcgctgctggaccctaccggcactgagtcgggcaccttgttccaggcggtgtaccagatcctcaaagtggtcaaggtgccggtctatgtagtcatcgtcgaagagggcgctaccccggccgacacgatcaacaatgtgatcggcggcaacgacccggtcaccggtcgcaagctgggcctggctgccctgagcagcgtccctgaagacctgaccatcatcggcgctccaggcttcacgggcaccaaagccgtagccggtgagttcgcctcgttcggcaaacgcatcaaggcccgtgtggtgctcgatggcaaggacgcgtcggtggccgaccaagtgacctacagcggcgagctgggcggtgccgacctgggcttcgaccgttgcctgctggtgcacaacatgccgtcggtgtactccaaggctgcgaagaagaatgtgttcctgtcgccatcctcgctggccatcgccgcactggccaaggtcaagcagtgggaaagcccgggtaatcaggtgaccttcgccgaggacgtttctcgcgtggtcgagtacaacatcctcgacacctccaccgaaggcgacctgctcaaccgatacggcgtgagctactacgcccgcaccatcctcggcggcttctccctgctgggtaaccgctccatcaccggcaagttcatcagctacgtcggcctggaagatgccatcagccgcaagctggtcaaggccggccagaaagccatggccaagaacctcaccaagtccttcatggaccaggaggtcaagcgcatcaacgattggctgcaaaccctggtggccgacgaaaccattcccggcggcagcgtgtacctgcacccggaactgaacagcgtcgagaagtacaagaacggtacctggttcatcgtcatcgactacggccgctacgcgccgaacgaacacatggtttatcaactcaacgcccgcgatgaaatcatcgagcagttcctggaggacgttctctaatgtttaccaaccgagtcagacaggccattgcggccacccttcaaggcctgccgttgtccgcaaccgtagaagagttcaccccgccgaagatcgagttcgacatggaagccatgtccggcgggcgctttattgccgaggaaatggccaagagcggcaaggtgctcaatgccaagctggtgctgcaaggtgccggcccggaaatcatgctggccctgggcgtgcgcatgggcgacgacattttgctgaacgtgcgtgaagccggtcaggaccaggacggcaagacctacttcacctaccacaccgtcggcggcaagctcaaatccctggaggaggcgaagctgaaaatgggcgacaaggccaccaccacgctggagctgtcctgccgtacctacaaccgtctggaaaatggcatttcggtgatcgacatcgatgtacgcacccagaagtttgtgctcaacggcgtcgacattcttggcgatgcgcgccgtgccgtgctgatgccttaaagatgactgctatctaaggcgggcacgatcaatgtgggagctggcttgcctgcgatgcaggcgactcggtgtatctggtgtatcgagtggatgctatcgcaggcaagccagctcccacacggaccgcgcgcagatttagatttgcggtgcttttcaacactgctcaacaaggaattgccccatggcctggatgccaccgttgcacatcctgctgtccccgatcaccgccgataccggtgcgacgatccagcaggttcagctcaaaccgttgttctacgccgcgcaaaaagacgcgctggcccgggccggtgatgacgaggacgaccagttcttcgaactggcgaaactcgccaccggcctgtcggaaaaagagctcgaccaactcaagcgcccggactacgtaagcattgctcaatacgtacacgaaatgtcgacgcggccggcttcgttctttttgaatgagcacgaagcgacgccccacgatcagcctgtccctctgctcttgcccctggaagccgctggccgaaccctcaccgaactgcccctggaaatgccggccctgcgcgccaccaaggtgatgaaaaaactcgccaccaacaaagagcgcgccgagttcatcaccgcccattgcaccggcctgatgatccccgacctggccggtttgaccgtgcccgactggaccgaactgcaggagcgtatcgacgattttttaaatcaaccggcggccttctttcgcagcgcgacatcgaagtaatcctcgatgtggtgccgctgatctactcggtcaatgaggcggagatcctcgactgggacgccggaaaagcattgcgccgctacgacattgcgatcactcgccttggcgtcaaacaggagtaagcgagatgcaggacaattattcgctcgcctatgccgtcgccaggaatggccgggatgcgttcggcagtacagacggcgcacatgacgccgatatcctcagccctggcgcgttgtcggttggcagctcaaccccgtcaacagatttggctgccttgtccggaaccgttgccgcactcaccagcgcaacgctcaaacttgatgagctcgcactgtcgctcggctcattgcgtgagggtgtggattctctcgacacggcgctgtcgtcgctgagggcaattgaggtgcgttcacccaagctgggtgagcaggcagaatcgaagacagtgtctgaatccgcttcgactacctcagagaatttgcgccatacccgcgaggccatgacgctgggcaccgcgcagataatcgacctggcaagtgcgctgcagcattcaggcagccaactgaagtttgataaaaccgcaacgtcggaaaagtcgatcaaggtgctgcgcgaggagtccagcgaaagcggcaaacgtttctctacgaccctggatgccacgccggtattgggcgaagcgctttggctgaaagccaagacgggcctgatggacagcgccagtgacgtggctaaagattcaccggctctggctggcgcgattaaaacggctggagctattacgccggtgttttccagctttttttcaagtgtgggagacacgataaaaaaccgcgttgctggcaacgtggttgatgcgacgctgggtaagcttcccggcgttggcaagctgttcaaggatggcggttctgcgaaagataaatcgtgctgttgtgcgacggccactcagcaccctatcgaaagtcctcgttcgcgctcgcagggctcgcgcgggaaaaagagccctcgtcagtcgaagtcgcaaaaaaagcagagctcttacaacactcagcgctctcagatcaggcagcaaaaacagccgctagtgcccaagacaggctcgaccaaacgatcgcctgccagcaaaaaaggcggcgtatttgccaggctgataaccagcctcgaacgtgatgcaaaggcattgttaccagcgccgttcttaggcttcgatgaggggcgggcggttcaaaggttacaaccgcgtgcggtcgcggcgaaccgtccaagcaagagcagatcttcaggccagtcgacagcgagcagaggccctgggctgatcgaggcagtagagcgcaagcttatccccatgtcttccgaaggccgggtaactgctgctgcgccccatactcgccatttcagtcgtgaggctttgcctggcccgctgaagatgccttccaacccgctgggaacagtgagcaaattgggagtggccggtgctcgccgccttggcccgatgaggtacgccgacactgctttggatgtgattcagggcgtacgcaacggggatgccaaggcagtcgggactggcctgagcaccgccggtggcgcctgggccggagcgtccgctggcgccgcgctcggtaccctggttttccccggtgtcggcaccgcaatcggcggcgccatcggtggcctgctgggcagcgaggcgggcagttggctgggtgacaaggtgtttggcgcaaatgatcgcctaccggcgcccaacgcgctgagcaaggaactcaacagtgcccgtaccgacaatgtccaggtcacgctctcaccgagcatccagattaccggcgttaacccggcggatgcccagcaagtcgtcaatcaagtgatccaggccctgcagttccaatgcgtgccgatggtcactgattccctgggcattcgacgcaacgcggcattggccgatccaggaggtgattgatgcgacaacaaatggtactgggcgactttattttcgggttatcccgagggttcgcctattccacactgacccgcaacagcgatggcggttggagcgacctggcgattatcgccagcaaaccccagtcgcggcagaacggccagaagctggaaaaactcacgttcagcggcacagccatgcgcgccactggcatgcagcgcctggacgaattgcgcgctttgcaaaatgcgcgagcgccgttgccgctggtggatggcatcggccgcaactggggcctgtggcgtatcaactcggtagtggaagcccaaagcaatgtgatcgatgacggcaccgccatggtcatgaactggacccttgagctggaggaattcgtcaatgcgtagagtacgaagtattgccggtgattcggtcaacctgttgctttaccgcgaattgggccgttgcgatgacaccgccgaagaaaccctttggcgcttgaaccccgaactcgccgaatacggcccggtactgccagccggtgtctgggtgatcgtgcctgagatacaagcacgaccggctgccatgcggcccgttctggcctgggattgaggaggctgcatggcacagggatttacgccgatcgtggagttctacggcgccaacgcggcgctgctcaatcaacgcctgatgcactggagccacaccgacgctgcaggcatcgagaccgatcgactggaactgacccttaatatcgaagggttggaaggcttgcccagcctcagtggcaagatcggcctgcgcgtcggatataaggaaacggggctggtggaaaaaggcgaatttgtgatcactcagcgaaccccggtgctgtttccgatgcgcctgatgatcgtcgccaccgccgcgcccttcagcgtggtggataaaagcggctaccgccagcgccgttccgccagccatgggccgaccaccttgggcgccttgtttcgccaactggtcagccgtcatggtttttcaccgcgtgtggcaccgacgttggacggtattgcgattgagcatatcgatcagtcaaacgaaagcgacatggccttcatcacccgcctggccaagcgttacaacgcggtcaccaagccgttcaacgaactctatgtgctggccgaagcggggcaagccaaatcactcaccggccagctattgcccgaagtgaagctgtccgtgacacacgacaaccgcccgggaaaccaggcctttatcaccgccaaacttgatgaaaaatcacgctccaaatacatgggcagccgcgtcagatggtgggacgccgccgccggcaagcagcgcgtggtccaggtcgggattgccccgttcaagaccttgcgccagccctgccagaacgaagccgaagcccgtgccgtggccgaaggcgaactgcgtcgcgtgggccgtgaaggcttgaagttacagatcgattgcccaggtaacccgttgctggcggccgaagggttgctgatgctggatgacacctggcctgtgtacatgcaggggcgctggtcgatcaccaaggtgacccacgttggtgatccagcgacgggatatcgcagttcgatcatcgctggtggtttggcggaacaggcctgacgcgcattgttcagacccgcttaagccccccaacaacgtacttataggaaagaggtctgttccatgtatacgattgactacaacgcgtatcgcactcttaaaccctacggcaaacgcgtacgcttcttagtgttgcattacactgcccaggatttttctgagtcgataaagtctctgaccaccggcgctgcaagtgctcattatctgatcccggatccaacagattcgagctacattgccgcgggtcacaaagggcagaaaattttcaacttggtggcggaagaggaccgtgcgtggcatgcgggcgttagccagtgggccggacgctcaggcttgaatgatacctctatcggtatcgagatcgtcaatcaggccacggatgtcgacggtgtattcacgttccccgactacgaggcttcacaaatcctagccctcaagcaattggcgattaatattctgcaacgttacccggacatgacgccgaaaaacgtgatcgcccattcagatattgcagtcggtcgcaaatcagacccgggtccgaagcttccctggaaagaacttgctgaggccggtattggcgcttggtacgacgactcaatcaaacacaaataccttcggcggttcaattgccaaatgcctgggcgagagcaagtggtcgaggcttttgccagctatggctacggcattgatgcgcccgcctctgatgtgttctttagtgcgttggtacgtgcttttcaactgcactttcgccctgaaaactataacggtgtgcttgatgcagaaacgtgcgcgattttgtatgcactgaatgaaaaatacgcttgagtcgtgtgtcatttaacactcgacttcagggaggagggctgcatggttgtgtctgagcaacagctaattaaagtgttaccaagctcccgccttaaagcgggagttttcatttcggtcttaaacacggccatgtctcgttaccaaatcaccacaccccagcgcactgccgcattccttgcccaagtgggccatgagtcgggtcagttgttctatgtccgcgaactgggcagtgatcaatacctgagcaaatacgacacaggcaccttggcggcgcgcctgggcaacaccccagaagcggacggtgatgggcaaatgtatcggggcagggggctgatccagataaccgggcgtcgcaattacatggcgtgcagccaagcgctgttcggtgacgatcgcctgctgcgacaaccaaaattgttggagcagccacaatgggcctgcgaatccgcagcctggttctggcaaagcaacggcctcaacgagctcgccgacaaaggccagttcaccaccatcacccgccgcatcaacggcggcctcaatggcctggacgcccgtttgcaattgtgggcgcgggcgaaggcggtgctatgcgtttcctaggcgcgtttggcttgatcggtgtgtgtctgctcatggcgcttgtgtggcaggtgcaggcatggcgatacggggcgcagttggagctgcaatcagtccgacatgcacaggcgctcagccagcaaaaccaggcaatcctcgaccagcaacaggccgaacagaccaaacgccaggcccttgaacaacagctctctactagtgaccatcaatacattcaggaattgaacgatgcccaacgcaaccaagcggctctgcgcgatcgcctggccactgctgatgtgcggctgtcagtccttctcgccaccgtcgccagtggctgcacagtgccagccgcccccagcgccggcggcgtggttcatgcagcctcgcgagcccgacttgacccggcgcatgctcagcgaattatccgcatcaccgacgacggcgataacgccctgatcgccttgcgtgcttgccaggcctacgtgcaggccgtcgcgcattagtctcttgatgcactctgtgtcttgcatggtcgataggctcctgtagggtaggcaaacccccgcccattcttggagacgaccgtgaaggaaatcactcaactggctgccgaactggggcgccgtttgcaggtgctcagtgcccacgtcaccactgccgagtcctgtaccggcggcggtattgccgaagccatcacgcggatcccgggcagttcggcctggttcgaggcgggctatgtcacttattccaaccggcagaagacccggcaactgaatgtgccggaaaagctgtttgccaaagtcggggccgtcagccaggaagtggtggaagcgatggcccgcggcgcgcaggaaaaaagcctggcgcggtttgccgtggcggtcagtggggtcgcgggccccgatggcggctcgccggacaagccggtgggtaccgtttggctggcctttgccgtgggcgacgaaattacggccgagcttgcgcacttccccggcaaccgcgacgaggtccgccgacaaacggtaaaagccgcgctggagggcttgttgcgacgagctgcagcagaaatagacaatcaggggtaggcgatcaccgatctttgtggaacaatactgtctacttatacaggtgttggccgtcaggccttattgattacgtgaggactttaatggacgacaacaagaagaaagccttggctgcggccctgggtcagatcgaacgtcaattcggcaagggtgccgtaatgcgtatgggcgatcacgaccgtcaggcgatcccggctatttccactggctctctgggtctggacatcgcactcggcattggcggcctgccaaaaggccgtatcgttgaaatctacggtcctgaatcttccggtaaaaccaccctgaccctgtcggtgattgcccaggcgcagaaaatgggcgccacctgtgcgttcgttgatgccgagcacgccctggatcctgagtacgccggcaagctgggcgtcaacgtcgatgacctgctggtttcccagccggacaccggcgagcaagccctggaaatcaccgacatgctggtgcgctccaacgccatcgacgtgatcgtggtcgactccgtggcggccctggtgcccaaggctgaaatcgaaggcgaaatgggcgacatgcacgtgggcctgcaagcccgcctgatgtcccaggcgctgcgtaaaatcaccggtaacatcaagaacgccaattgcctggtgatcttcatcaaccagatccgtatgaagatcggcgtgatgttcggcagcccggaaaccaccaccggtggtaacgcgctgaagttctacgcctctgtccgtctggatatccgccgtaccggcgcggtgaaggaaggcgacgaggttgttggtagcgaaacccgcgtcaaggttgtgaagaacaaggtagcgccgccattccgtcaggcagagttccagattctctacggtaagggtatttacctgaacggcgagatgatcgacctgggcgtactgcacggtttcgtcgagaagtccggtgcctggtatgcctacaacggcagcaagatcggtcagggtaaggccaactcggccaagttcctggcggataacccggatatcgctgccacgcttgagaagcagatccgcgacaagctgctgactgccgcgccagatgtaaaagcggctgccaaccgtgagccggttgaagaagtggaagaagccgacactgacatctgaagcaaacgatgactgttgtacttgatacactcgtcgccgttcggcgcactgcgatggacctgctcgctcgccgcgagcatggtcgagtcgagctgacacgtaagctgcgtcagcgcggcgcagagcctgagatgatcgaaacagccctcgaccggttgacggaagaagggctgttgtcggaagcccgttaccttgaaagttttgtgtcttaccgcgcacgttccggttacggccctgcgcggattcgtgaagaactgagccaacgtggcctgcaacgtgccgatatcgacctcgcgctacgtgagtgcggtatcagttggcagtcgcaattggaggaaacctggcgtcgcaagtttgcgggccaccttccaattgatgccagggagcgtgcgaagcaaggtcgtttcttgagttatcgcgggttttcgatggacatgatcagccgcttattgagcggtcgggatatggacgactgaacgccaaaaaaacaaaaggcccactatgaaaatagtgggccttttttttcgcctgtaaaaaatcacgctgtctctggcgtcatccgttgctgcgccttgccctgagcctgtgcccagttctccggcaggttgatgtaatccaccaactcccgcagccgcccctgatcgcgaccgttgaaattgaacaccaggcgcgtcaaatggctgaatctcggttcgtcatggtcttcgccggtataggcgagttgctggaactcgccactgagccgcaggctggcaaacgcttgttgcatatgggccagggcgcgctcactcagcggatgattcatgcgcactacgaactcacgcttaagccaacgggtggagtggaagttggcgtagaactggttgatttcgtccacggcctcttcggcgctgtacaccaggcggaccagtttgaggtcggtgggcaggatatagcgattggcttccaactggccgcggatgaagtccagggcgccttgccagaacccaccgcccggcgcatccagtagcacgaccggcaccagcgggcttttgccggtttggatcagggtcagcacttccaatgcctcgtcgagggtgccgaaaccgccagggcacaacaccagcgcgtcggcttctttgacgaagaacagcttgcgggtgaagaagaagtggaatgacagcaggttttcggtgccatcaatggtcgggttggcgtgctgttcaaagggcagggtgatattgaaccccaggctgtgctctaggcccgcgccttcgtgggctgcggccatgatgccgccaccgccgccggtgatgaccatcaggtcggaacgtgcgagcgcggcacccacttctcgggccagcgcatacaaggggctttccactggtgtacgcgccgagccgaataccgtgactttgcgccggcccttgaactgttcgagaacgcgaaaggcatggtccaattcgcggatggcgcgcagggtgattttggcgttccagcggtcacggtcgtcctgggccatgcgcaggacggtgaggatcatgtctcgataaagagggatattcggactgttgggagcgatcaactgaatttgtgcgtcgacctgctgagtaaggtcggtcccgttttcttcaaaatgacgaagcagcaaatcattcgattcataaggcattcaatttctcctttctttacagggcctggtagtcgacgagaacgtcgcttgggccacgacactgcttgtgtcgcggcatgccgcaggagggcaggccttttttgtcctgaaaatatgacagagcagcattaaaaactgtggtgggcgggtagccgggctaaacggatgatgggccgaaaaacccttggctggcaaccgcttattggtggctcattacgcagttcagtcgcaggcagcaaacgcagcacgggcgtgcgcgccgctggacagcggcgccggaggggcaagcagaggttactttttcttcttcgccggagccgggcaatcggactctgcaaacttgaccgaagccaccgggcgattggtcttgttctcggtgatttcatagcgcatcactgcgcccttggccatcagctcgcgatagcctgggttggtgcacacactgcgccccagctggaaatacacagccttggggttggcgcgcatctgttcggcacggtcaggcagcacgctgaggtgatcgatcaactgcatgccttcaacggtgtaggcgacttccagggttttttcatcgatttcccggggcaggtccttgttgctttcggccgcgacgctttgcagcttcttgttcatttgagcctccagcagcgaggccgcatgggcgcccataggcaagaccagcgcaagggcgacggatggggcaacaaggcgcagcatggaacgcagcatgaaactctcctgattcggttactggtgcatagaccagccactgggctgtgcgttcagtggcgcgcaattataggtgagcccttgccactacagccaggcgtatcgctggtaaactgcgggacttctgtttttcacgagtttgttccgtgtcgatttccttttcttcgccgcgtgcccgatgagccacgccgtctcccgtttgcgtacccagcgtctggcgcgtgccgtcaggccgtttctcaatcggggttcgcgtgctgaacgctgtcccggctgtcgggtcattcctgaatactgcctatgtgcctggcggccgcaggtagaagccaagtccgccatgtgcctgttgatgcatgacgtagagccgatgaaacccagcaacacgggctggctgatcgccgatgtcatacacgacaccaccgcgttcgcctggtcgcgtaccgaagtcgaccccgagctgctcaggttgctggccgactcgcagtggcaaccgtatatcgtatttcccggcgaattcgtggcgccgcaacgggtggtcagtgaagtgtgcgtggatgtgggcaagcgcccgctgttcattctgctggacggtacctggagcgaagcgcgcaagatgtttcgcaaaagcccctacctggaacatttacccgtgctgagcctggcgcccgagcagctgtcgcgttacaagctacggcgctctaagcgtgatgaccatttctgcaccgccgaggtggcggcgctgtgcctggagctggctgatgacctgggcgccagcgaagtgctggatgcctacctcgatgtgttcagcacccactacctggctgccaagttccaactgccattggatgctgcggacgccgtgcatacgcgcctcgcaccctacatcccggcgggataaccagacgacgtttgcatgatggcactgtaagcccgcaacccgctaaaatccccacgggcgtagtgcttgaccctccaggctacgctgggcatgctgtgcgccgattgggtgcaaccgtgaattatcgacgtcgtttcatgtgtttttgacgttgagcgggccctgtggcgatcgctgcctggccgtcgcctcgtgtattggtgaaccctgaacccatcagggctcccataaaaaacaggatcatttaaccaatggccacatacgaaatcctgattgccgatgaccacccgctgtttcgcagcgcgctgcatcaggccgtaaccctgggccttggccccgatgtacgtctggtcgaagtggccagcattgccgaactggaagcccgcctcaccgaaaaatccgactgggacctggtattgctcgacctgaacatgccgggtgcctacggtttctccgggttggtgctgttgcgtgggcaatatccgcaaataccggtggtgatggtgtcggcccaggaagaagccgatgtggtggtgcgttccaaagagtttggcgccagcggtttcattcccaagtccagcgcgatggaagatatccagaaagccgtgcgtacggtgttggacggcgatgtgtcctggccaccccaggcgtttgaacaaatcaatgtgtccgatgaagccaaggccgcccgcgatggcctggccagcttgacgccccagcagttccgggtattgaccatggtttgcgaagggttgttgaacaagcagattgcctacgagttgagtgtgtccgaagcgaccatcaaggcccacgttacggcgattttccgtaagttaggcgtgcgtacgcgcacccaggcggcgttgctgctgcagcaacttgagtctatctcgcaacattaagttacagccgcttcacgcttttttgactttgcgtgatctagcttccccacttctttggttcagttgcctacatctatgtcgcctttcaagggtcaaaccggtatcaaacgtatcttcaacgcagggggctattccctggatggcctgcgtgcagctttcactggcgaggcggcattccgccagttggtattgttgaacgtcatcctgatccccctgagctttttcctgcaggtcagccgggttgaacgggcgctgctgattgcagtgtgtttgttggcgctgatcgttgaattgctcaactcagcggtagaagcggccattgaccgtatctccctggaccgccacccgctgtcgaagaacgccaaggacatgggtagtgccgcgcagttcgtggcactgaccatgatcaccctggtatgggccgtgatcctgatctgacgatcacgcgatactcggcagcacgatctcgtcgctgcgctgcaccccagcggtgaaggcgcggcacagttcgagaaactcgcgcatcgccgaggtctggtacttctgcttgtgccagatgaagtagaactgccgggccaggtccaggtccggggtttccaccggcaccaggctgccacggcggaaggcatcgcgcagcgccagccgcgaaatgcagccaatccccaagcctgactccacggcccgcttgattgcctccgtgtgttccagttccaggcggatattgagtgcgctgcggtgatgacgcatggcctggtcgaaggtcaggcgcgtgcccgagccttgttcccgcaggatccacgcttcgtgggtcaattcgtccatggttgccacgccgcgcttggccaaatgatgctgaggggcgcaaaacaccaccagctcatcttctacccaggtttgcacctcgatatccggatggctgcagtcgccttcgattagacccaggtcaatttcgtaatgggcaacctgatgcacgatatgcgcagtgttctgcacatgcagctttacctggctctcggggtgttgctgcatgaagctgccaatcaacagcgtcgccaggtaattgccgatggtcagcgtggcgccgaccgcaagggagccgaagccggacttgccgttgagcaggtcttcgatctccttggcctggtccagcagcgcaacggcctggggcaacagttggtgaccgagggcgttgaggctcaggcgtttaccggcgcggtcgaataattggcagctggattgacgctccagctcggtgattgaggtgctggcggcggattgagataaggccagaaggccagcagcgcgcgagacgctttcctgctgggcgacggcgacgaaaacttgcagttgacggagagtaaatcgcatatcgatataaccgataacccttatcttaataatccagttaacagatattgtcgccgccattagaatgctgtgcaattgcgcatccttacctttggcgcagacccatttccaggagtcccccgtacatgagcaacatgaaccacgagcgtgtcctcagtgttcatcactggaacgacactctgttcagcttcaagtgcacccgcgatccgggcctgcgcttcgagaacggtcagttcgtgatgatcggcctgcaacagcccaacggccgcccgctcatgcgcgcttactccattgccagcccgaactgggaagagcatctggagttcttcagcatcaaggtgcccgatggcccgctgacttcccagttgcagcatctgaaggaaggcgacgagatcatcatcagcaaaaaaccgacaggcaccctggtacttgacgatttgaagccgggcaagcatctgtatctgctcagcaccggcactggcctcgccccattcatgagcgtgatccaggacccagagacctacgagcgtttcgaaaaagtcatcctgtgccacggcgtgcgctacgtcaacgaagtcgcctaccgcgaattcatcaccgagcacctgccgcagaacgagttcttcggcgaggccctgcgtgacaagttgatctactacccgaccgtgacccgcgagccgttcgaaaacgaaggccgcctgaccgacctgatgcgcagtggcaagctgttcagcgacatcggcctgccgccgatcaaccccgaggacgaccgcgccatgctgtgcggcagcccaagcatgttggacgagaccagcgaagtgttgaacagcttcggtctcaaggtttcgccacggatgcgtgagccgggtgactacctgatcgagcgtgcgttcgtcgagaagtgatacggagtcagtaacaccagcgatccaaaaagtgtgggagctggcttgcctgcgatgcagacacctcagtggttcagttgaaccgaggtgatgctatcgcaggcaagccagctcccacatttggttttcgccctatttagttagccgaaaccacttccagcacacaaatcattcccggctccgggtagtgccagcgcacatccacgtcccagaagcgcacaccgtattcacgctcagggccgggcgtttggtaggccggtcgcggatcttgcgccaggcattgatcaatcaactctaccaacggttcaccaaggcgctgcgcatggccttgcgcctgttgcagtgcggccttgagccattgcacgccgatcagttggggggcatcgctggcgatgtggttggtggctgcatcaacattatcggcatagggcacatacggcttgatatccagcaccggcgtgccatcgagcaaatctatgccggaaatccacagtcgccccggctccaccttgtccagtttcaccaccgactggccgatgccattgggacgatgggtcgcacgggtagcaaatacacccatggaggtattgccccccaggcgtggcgggcgcactttcaggcgtggcttgtcttccagggtttggtggaacaggaacagcagccacacatggctgacctgctccagcccctgcaccgcctcaccctggtcgaacggcgccaccaactccagcacgccgcgggcagccggcgccaactgcggttggcgcgggatggcgaacttctccttgaagcaagagcgcacgaagccgaccggggagacctgatagctcatggcttaagcacgaacccgcagggtcaagcccttgaggaagttgcgcagcaactggtcgccacaggtgcggtagttggtgtggccgaacttgcggaacaacgcgctcagctctggcttggacaccgggaactccgccgccttgaggattgcatgcatgtcgtcttccttcagttcgaaggccacacgcagcttttttaggatgatgttgttggtcaccggggtttcgattggttgcggcgggcggctttcgtccttgccgcgcttgaagatcaccagaccgtcaaggaagtgcgccatgacgtcatccgggcagaacacgaagccttcttcctcatcttttttgaggtaggtcagcaggtcttccttggtcacgtccatgccgccgagcttgatgatctcgaccatcttgttgtcgctgatgtcgagcatgtagcgcacgctgcgcagtacgtcgttgtgaatcatggtgggcaatcctggtattcaacggatgacaccgccggaatcaggcggtgtcgggaaaagggaacggcttaaaacttttctttgccggacaggtaacgccattggcccaccggcaccttgccgatggacacgccgccgatacggatacggcggatggcgatgactttcaggccaacggcttcgcagaacagcgcgatcacgccgggttgcgggtttttcatcgcaaagcgtaggcggttttcgttctgccagctggctttgacggcaggcagctctttgcctttgtaggtcaggccgtggttcaggcggttgaggccgtgggcaaccatgtcgccttcgacttccaccacgtattcctgctcgatcttggcggcatcggcggtcaacttgcgcagaatcttccagtcctgggtgaacaccagcaggccactggccttggcttgcaggtcggcgctggcgctcaggcgcagaaagtgccccttgagcgggcgcttgccgaagcggtgttcttcagagagggtatcggcgctgatcgaggccatggcggtttcagcatccacgcctgcgggggcgtgcagcaggatggtcaccggctctggcgcggtggctttggcctctgggtccagctcgactttctcgtcagtgaccttgaactgcggctcgtcgatcacttcgccgtccaccgagacccagccgccttcgataaacagctcagcctcccgacgggagcaaccgaccagttcgataaggcgtttggagaggcgtatggggtcagtcatgacaagggccgtaacaaaagggggccactattgtacctgcctggcgccggttaatcccggctccatttcagcgcatgtgccctaacaattatttaactgacgcaacacgggccaaatgtgggagctggcttgcctgcgatggcggtataccagcaccggatgggtagactgacccgacgccttcgcaggcaagccagctcccacagtttgtacgggatgatttcaggcattacgggcctgttgctgctggcgcagacgcaggtgcaacaacggataaggctgcccaagcccatcatgttctgttcgcccgatcacctcgaagccttgcttgagataaaatcccaaggcctgggggttctgttcgttgacgtccagttcatcggcattcatgtgttcgatcgcgtaacccagcaattgccggcccagcccctggccacggtagtgcgggtcgataaacagcatttccaccttgcccgccgacacgccggcgaatccgttgatgcgttggcgcgagtccttggtgcagatcagcatcaccgcatcgaggtagcgggtcagcaccaggtttttcaacatgtcgatatagctgtccgggaggaagtcgtgggtggcgcgtaccgagtcctcccagatctgcaccaggcgcgcgtagtcgctggttctaggtgtgtgaatcaccgaatgctgacgcatacccgctgtcccttgctgtattcggggttgatgggcaatacgatagacctaaaaaagccccgcatcttctcagaggcggggcttttttatcatcgggcgatcagtcgcgcttttcggcccacaagtcgtactcgtcggcgtcggtcacggtgcaccacactttgtcacccggcttcaggccgctggcatcgtcgataaacacgttaccgtcgatttcaggggcgtcaaagaagcagcggcccaccgcgccttgctcgtcgacttcatcgatgagcacttcgatttccttgccgatgcgcagttgcaggcgtgccgagctgatggcctgctgatgcgccatgaagcgctcccagcggtcttgcttgacgtcgtccggcaccacggccaggtccagcaggttggccggagcaccttccaccggcgagtactggaagcaaccgacgcggtccagctgcgcttcggtcagccagtccagcaggtactggaagtcttcttcggtctcgccggggaagccgacgatgaaagtggagcggatgatcagctccgggcagatctcgcgccagttcttgatgcgtgccagggtcttgtcttcgaacgccgggcgtttcatcgccttgagcactttcgggctggcgtgctggaacgggatgtccaggtacggcaggatcttgcccgcggccatcaacgggatcaactcgtccacgtgcgggtaagggtaaacatagtgcaggcgcacccacacgcccaggctgctaagggcttcgcacaactcggtcatgcgggttttcaccggcgcgccattccagaaaccggtgcggtatttcacatcgacgccgtaggcgctggtgtcctgggagatcaccagcagctccttgacgccagacttgaccaggcgctgggcctcgtcgagcacgtcacccaccgggcggctcaccagtttgccgcgcatcgacgggatgatgcagaagctgcagctgtggttgcagccttccgaaatcttcaggtacgcgtagtggcgcggggtcagcttgatgccttgaggcggcaccaagtcgatcagcgggttgtgatcctggcgtggcggcaccacctcgtgcacagcgttgaccacctgctcgtactgctgcgggccggtcacggccagcacgctcgggtgcacgttgcggatattgccttcttccacccccatgcagccggtcacgatgaccttgccgttttccttgatggcttcgccgatcacttccagggattcggctttggccgagtcgatgaagccgcaggtgttgaccaccaccacatcggcgtcctggtaagtggacacgacgtcgtagccttccatacgcaattgcgtgaggatgcgctcggagtcgacaagcgccttcgggcaacccagggaaacaaagccaaccttggggttggcttttgcgatggtggtggacatgtctaacctcggtattgaatgacgctgccggtcgtgcacgacaaggcaacggatgggcgcttggtgcgcctctgatcaaaaagtgcgcaattctatcggcgggcagcgcacttgaccagctttatgcagggaaatgcgacgagtgctgtatcggggcattcttacagccgttaccactctcttaagcccggacgtcttgctctgcgcggtgcgatacaactttagacatgcccacacctaacgcctgaagcactttcaggagagtggagagcttcgggtcgccgccgacggcgatggatctgtagagatttgctctattgaggcccgtattctgcgacaagctgagcattccgccacgggcttccgcgactcggcggacagcgacaaggaaggcgtcctcaccacccgcttcatcaatttcctcaagtgcgacagaaagatattcgagagcaaacgcttcgtcgtctcggagcatttcaagaacgctatcttcatgagagcgagtacgaatggtcatttttgctgcaccttgtaagatttccagagagccttggcctgatcgatgtcgttttgctgtctggcctttgaaccaccacccaacaggaaaacaatttttcgatcttggattgcgtaatacacgcgaaagccaggtccgaagtcgagcttcatctcaaagaccccatcacccaccggctcggtaattccaaagtgaccaagggatgctcggtccactctggtggtgattcgtgcctttgaacgcgtgtcttgcacggtatctagccaagcttgatagatatccacgccattgactgacagtacatgtttcacttcgtacatgcggaatgtaccttaaaagagacaggtcgatgattgagtttttatatcgaccgcgagcgccagacagtcggcacgctttttattgatcagcaagctggagtcccggcttacgccgctaaggcagctctaccgagtcgggccaaaaatatacggctgacggtaaatgtgatcaatgcaggcaaaaaggctccaaaacgccttgtcatctattactgactgcctaaaacgacacccaaatcacttgagcagggaaatgcgacgagtgctgcgctatgcttcgcgccgttgcacacgggtaaagcccttgggtcaataaaacgtctgttacgagaagtaaaacagcgcatgctagggtcagcttagaagcgctgtttataaaagacctcaggtcaaagggcaggagtggttgatgggtcaggcaagtagtcaggcagcaggtgccgagcattcaaaagccaagccgattggcatgctggtggcggcggtcggggtggtttatggcgatatcgggaccagcccgctctacacccttaaagaggtgttcaacggcggttatggggtgcaggtcaaccatgacggcgtcttggggatcctggcgctgatcttctggtcgctgatctgggtggtgtcgatcaagtatgtgctgttcgtgctgcgtgccgacaaccagggcgagggcggcatcatggccctcaccgcgttggcccggcgagctgccgggaagcacacgaaattgcgcagtttcctggtggtatgtggcctgtgtggcgcggcgctgttctacggcgacagtatgatcaccccggcgatttcggtgttgtcggccatcgaaggcttggaactggcgttcgacggcctggaaaaatgggtggtgcccattgccttggtggtgctggtggcgctgttcctgatccagaaacacggcaccgaccgcatcggcaagctgttcggcccggtgatggtcacctggttcctggtgttgggcggcctgggggtgtatggcattctgcagcaacccgaagtgctcaatgctctgaacccggcatggggcgtgcgcttctttatggtgcaccccggtattggcgtggcgatcctcggcgcggtggtattggcattgaccggcgccgaagcgttgtacgccgacatgggccacttcggccgcaaacccattgcccgtgcgtggtttctgctggtgctgccggcgctggtgctcaactatttcggccagggcgcgatgctgctgggcgatccggaggcggcgcgcaacccgttctacctgctggcgccaagctgggcgctggtgccgttggtgggcttgtccaccatggccacggtgattgcttcccaggcggtgatttccggcgcgttctcgttgacccgccaagcgatccagttgggttacataccgcgcatgcatatccagcacacctccagtgccgagcagggccagatctacatcggtgcggtgaactggtcgttgatggtcggcgtgatcctgcttgtgttgggcttcgaatcctccggtgccctggcctcggcctatggtgtcgccgtgacgggcaccatgctgatgaccaccatcctggtatcggcggtcatgctgctgctgtggaaatggccaccggtgctggccgtgccgctgttgctctgctgcctgttggtggacggtctgttcttcgccgccaacgcgccgaagatcctccagggcggcgccttcccggtattggcggggatcgtgctgtttgtgctgatgaccacctggaagcgcggcaagcaattgctggtcggccgtctcgacgagggtggcttgccattgccgatcttcatcagcagtatccgcgtacagccgccccatcgcgtgcagggcacggcggtgttcctcaccgcgcggcccgacgccgtgcctcatgcgctgttgcacaacctgctgcataaccaggtgctgcatgagcaagtggtgctgttgaccgtggtttacgaagacattccacgggtgccttcagcgcggcgcttcgaggtggatgcctacggcgaaggcttcttccgagtgatcctgcacttcgggtttaccgatgaaccagacgtgcccgaagcgttgaagctgtgccacttggatgagctggacttcagcccgatgcgcaccacctacttccttagccgtgaaacggtgatcgcctcgcgcatcaaaggcatggcccgttggcgcgaagtgttgtttgccttcatgttgaaaaacgccaacggcaacctgcggttcttcaaactgccggtcaaccgtgtgatcgagctgggcacccaggtcgagatgtaaggcgctgcctaccgggagccggcaatcggctcccgctttccttctgaaccctgtgcaaacgacggttgtcgactaggctggtaggagcgagctcgctcctacaaaaatgcctatgaagcccagaagaggtgcgccatgagtcagctgctcgaaccttacaccctgcgccaattgaccctgctcaaccgcatcgcggtttcacccatgtgccaatactccagcgacgatggcctggccaatgactggcacctggtgcatctcggcagccgggccgtgggtggcgccgggctgatttttaccgaggccacggcggtgaccgccgatggccgtatcaccgcccaggacctgggcctgtggaacgacgcccagatcgaaccgttgcggcgcatcacccgttttatcgcggcccagggcgcggtggctgggatccagctggcccatgccgggcgcaaggccagcacccatcggccatggatcggcaaacatggtagcgtcaagccggaggagggcggctgggtgccggtggggccttcgccgattgccttcgaccccaatcacacgcagcccaagccactggacgaagggcagatccagcaagtgatcgccgactttgtcgccgccgccaagcgcgccttgaccgcaggctttgaagtggtggaaatccacgccgcccacgggtacctgctgcaccagttcctctcgccgatcagcaaccagcgtcaggaccactacggcggctcttttgaaaaccgcatccgcctggtgctggaagtgaccaaggccgtgcgcgccgtgtggcctgatgagttgccgctgtttgtgcgcgtgtcggccactgactgggtggaagacggctggaacccggatgaaaccgtggagttggcgcgccgcctgaaagatctgggggtggatctgatcgacgtgtcgtccggtggcaccgccgcgaatgccgagattcctaccggccccggataccaaacgcgcttcgccgagcgcgtgcgcaaggaatcgggcatggccaccggcaccgtcggcatgattaccgaacccgctcaagccgagcacatcctgcgtacctgccaggccgacattattttcctggcccgcgaactgctgcgtgacccctactggccactgcacgccgacgatgacctgggtgggcgcaaggcaatctggccggcgcaataccaacgggcgacccaccgggatcagccgatccatgagtcagacctgcgggattgaccctgttcacctctgtgccaaacccaccctgacacggtgggttttttcttgcgcgcgttgtaggcgttgcgcagccgatatcgaccaccctgtgagcaatcgctgtaggcttttattaccgacgttattttttaagttaatactctaaaaaaatcccacgaatgatgagatagtttctacgctaagggtaagcccgacttctggcccagggagacaggcggttggtccgcgaagccgttgcgcttctcgggagttgggaaatgggcaccaggagtatttgactgatatcaggagtagcggtccatggccaagtcctatggcgtagcgggtgcggtggcgtcttttctgagccgccggatgtctttacggggtcgaaggttgagttcagatgaaatggagttgctggcgcaatatcgggcgctgaccgagagcgatcaggtggcgatgcgctatttgattggcgcgatgaaaagcgtgtcgcggttctgagccaaatccgatcattcccacgttattgcgtgggaatgatcgtgcagtgtggcatcaggtgtacttgcgctgttctggcgcaggcgggaagtactgatacagccaggtttcactcagggtgcggtcctgggtgcgaataaacaggcgtagctcgaccggctccacgctgtcgctggtggggtaccagtcgaacaggatgcggtaccccttgatgttgtctagcaccagcacgctgaagtccttcacctcaccgtgggaacaggtcaccacaggctcgatgccagtgcccgccggcaggcgatccaggccgccgcccttgaagtccacggcaaaacgcctggcccatactttcggataatgctcgccgggtgcccagccttcggtaaaaccgcccatgcccgaacgggtcgcgtcgacctgtgccagcggcgtgctcactggcggcagtgcgctccagtacagcttgtagccgtagttgagcgaatcaccggcggccaccggttttttcggagtccagaaggccacgatgttgtccagggtttcaccagtggtggggatttccagcaggtcgatcgagccttcgccccaggccgtggtcggttcaacccacaggcttgggcgtttgctgtaccagtcgacggtgtcttggtagctggcgaactcatggtcggtctgcaccaggccgaagcctttggggtcggtgtcggcgaacgcgttgaattgcagcttggccgggttgttcaggggccggcagacccattcgccgttgccgcgccacatggccaggcggtctgagtcgtggatttgcgggtgaatggtgtcgcacatgcggcgctcatgggtgccgcagctgaacatactggtcatgggcgcgatgcccagttgttcgatggcggtgcgcgcattgatgtgcgcgtcaatcgccatcaccacttggttggcctggcagtcgatgtcgaagcgataggcgccagtggcgcttggcgagtcgagcagggcgtagaccacaaagcgcgtggcgttcttgtccggggtttcgaaccagaactgcgtgaaatcagggaattcctcgcgttttttcgcgtaggtatcaatcgccaggccacgcgccgagaggccgtactggccggtggaatccactgcgcgaaagtagctggcgcccagaaacgagagcacgtcatggcggtccagttccggcgccttgaacagcttgaagccggagaaacccaggtcgccggtcagttgctgggtgtccaccgtggttttttcatagttgaacagcgaagggcgaaagtgcacttcgcgggcttcacgggtcttggggtcgacgctgtgcatgcgtaccggcgtcttgaaacccatgccaacgtggaagaactgcacgtccagttggccgttcaactccttccacagcgaatggttacggtcatagccgatggcgttgaagttctgcggggtcatggtggccagggtcggcggcagcacctgcttagtgtcctggtagccacgggtggccaactgcttggcctgggccttgagcgattcgaaatcgaacgccacggccttgccatcggcagcccgattaccggcccaggcctgcgcggccagcaggccactggccgacaaaccggtgtaagccgcaatggccatggatgctttgagcaaattcctgcggtgcatagagacaacctgtcgtgagcaaatcccgcgccgttcctggcacgtagcggatcagaaataacggttcggacatgccttcggccaaacgcaacggacaataaacagacgccggatagcttaagcggttcgatgagcaaggcaaattgattgatggcgggatgatggcgttgcatgtgcaacaagacatttccagcatcgcaactgagcgttacatctggaagcactctagatcacggctttttggcacttagttttacgctggaggcctattggtcctacgaacccaagtgtctggaggctacgaatgaatacccgtggattgctcgatcaactgctcaagtctggccaggacatgttgcaaaacaaggccggcggccaacgcaaagccaatgaaaagggcgccctcggcggcttgctcaacggtggcgggctcggcagcatgctcggcggtgccggcggcggcgccctggcagcgggagccatgggcttgctgctgggcaacaaaaaagcccgcaaattcgggggcaaggcactcacctacggcggcctggccgcactcggtgtgattgcctacaaggcttacggcaactggcaagcccagcaggccagcgcgccccaaggcgagccgcaaaccatcgaccgcctgccagcggcccaggtcgaacaacacagccaaggcattctcaaggcactggtagccgcggccaaggctgacgggcatgtggatgagcgcgagcgcgccttgatcgaaggcgaatttaccaagctggacaatgatcaggagttgcaacactggctacacgccgagctcaacaaacccctggaccccaccgacgtcgcccgcgccgccagcaccccggaaatggccgccgaaatgtacatcgccagcgtgatgctggtggacgaagaaaacttcatggaaaaagcctacctggacgaactggcccgccaactgaaacttgagccaggcttgaagctggagttggaaaaacaagtgcggcttaacgcataaacaaggcctcacgcccatcaaaaatgtgggagcgggcttgctcgcgaatgcggtagaccagtcactctatttctggctgactcaccgcatccgcgagcaagcccgcgcccacttttgcattctgtgcactgcacatcaaaagccttgataaaagcgcgcagccgctcagctatactcccctccatttgaatggccctgcgaggaattactgtgaagaactggaccctgcgccaaaggattttggcgagctttgcggtaattatcgcgatcatgctgctgatggtcgtggtctcgtattcgcgcttgctgaaaatcgaaatcagcgaaaactcagtgcgggacgatgcggtgcccggggtgtttttcagctcgatgattcgcagcgcctgggtcgacagctacctgcaaacccaggagttggtcggaatccacgagaaccagggtatttccgaaaccgacaaacaggactacaagtctttcgaggctcggcttgagcaacatatggccagctacgcagggacgatcaatatcacccaggatcgcaccgaattcgatgccttcgaaaaactgcaccagagctacaaccagattctcgcccaggttttggcggcccatcagagcaataacgccgccgaagcactgaggttgttcaacgagcaactgacccccgcctggacagcaggccgcatgaagctcaatgacattatcaatgagaacaagcaggtcgccgacaacgccaccgccgccatcgatgatgcggtagcggccgcgaagatcagcatgggcgtttcgctattgctggcgattctcgccgccgcgctgtgtggcctgttgctgatgcgcgcgatcatggcgccgatgcagcgcatcgttcaaatcctcgaagtcatgcgcaccggtgacctgagcaagcgcctgaatctggagcgcaaggacgaattcaacgcggttgaaaccggcttcaacgacatgatgaccgagctgactgccctggtgtcccaggcgcagcgttcatcggtgcaggtcactacctcggtcaccgagattgccgcgacctccaagcagcaacaggcgaccgcgacagaaaccgcggccacgaccaccgaaatcggcgccacttcccgcgaaattgccgccacgtccaaggacttggtccgcaccatgaccgaagtctccaccgccgccgaccaagcctcggtggctgcaggttccggccagcagggcctggcccgcatggaagaaaccatgcactcggtgatgggcgccgccgacctggtcaacgccaagctggcgatcctcaatgagaaggccggcaacatcaaccaggtggtagtgaccatcgtcaaggtggccgaccagaccaacctgttgtcgctcaatgcggccatcgaggctgagaaagccggtgaatacgggcgcggctttgccgtggttgccaccgaagtgcgccgcctggccgaccagaccgccgtggcgacctacgacattgaacagatggtgcgtgagatccagtcggcggtgtcggcgggggtgatgggcatggacaagttttccgaggaggtgcgtcgcggcatgtccgaggtgcaacaagtgggcgagcaactgtcgcagatcatccatcaggtacaggccctggcgccgcgggtgttgatggtcaacgaaggcatgcaggcccaggccaccggcgccgagcagatcaaccatgcgctggtgcaattgggcgatgccagcagccagaccgtcgaatccctgcgccaggccagctttgccattgatgaactgagccaggttgcggtcggtctgcgcagcggcgtctcgcgtttcaaagtctgatgagcgagctcgcggctaaacgcggtgccgtcccggcagcgaaaaaggcgttgttcctggtgtttcgcatcggcaacgaacgctttgccctcaaggccaccgaagtggccgaggtgctgccgcgcctggcccttaaacccatcgcccaagcgccgttatgggtggcgggtatcttcgcccatcgtggggtgctggtgccggtcatcgacttgagcgcgctgacgttcggcacttcggcccaggcgcgcaccagtacgcgcctggtgctggtcaattaccaaccgcagccctggagtgaggcgcgttggctggggctgatcctagaacaggccaccgacaccctgcgttgcgaccccgccgagttccagccctatggccttgacaaccagcaggcgccgtacctggggccggtgcgcgaggatgcccaaggcttgatgcagtggattggcgtcgcggatctgttgaccgcgccagtgcgcgccttgttgttctgcgccgagttgagcctatgagcaatgacccgcggtttttcgcgttcttgaaagaacgcatcggcctggacgtcgcttcggtgggcgaggcgatcatcgagcgcgcggtgcgccagcgctgccagtcgtcccagtcgccgtcggcggaggcttactggcaacacctgcaaacctcccatgacgagcagcaggcgctgatcgaagcggtgatcgtccccgagacctggtttttccgctatcccgaatcctttgcaaccctggctcgcctggcccaggcacgcctggccgagatcaatcagatgcgcgccctgcgcattctcagcctgccgtgttcgaccggcgaagagccctattcgattgccatggccttgctcgatgcggggctggcgccccaccagttcaaagtacagggcatggacgtcagcccgctgtcggtggagcgcgcgcggcggggcgtgtatggcaagaactcgtttcgcggcgctgaccttgagtttcgcgaccgccacttcactgaagacgcaggcagttaccgcattgccgaccgagtgcgtgagcaagtgcgcctgcaagtcggcaacttgctggacccggcactgctggcgaacgagccaacctacgattttgtgttctgccgcaacctgctgatctacttcgaccagccgacccagaaacaggtctttgatgtgctcaaggcgttgacacacgtggacggcgtgctgtttatcggcccggccgagggcagcctgctggggcgccacggtatgcgctccatcggcgtaccgcagtccttcgctttcagtcggcatgtagaaccgaccccgccgccagcacctctggtcaaaccgacgcccgcgccgctgccgcagcgcagggcggcgccgataccgctcaagccgcggccgttcagcacggtcagcccccgcgtgccaccggtcaaaggggtgcctaccgatgccggggatttgctcagccagatcgcaaccctggccaacgagggcaaaagtgccgaggcccgtgcggcctgcgagcgctatttgagcagccacccaccggccgcccaggtgttttattggctggggctgctcagcgatgtggctggcagcgccctggaggcccaggggtattaccgaaaagccctgtatctggaaccgcagcatccccaggccctgatgcacctggccgcgttgctcgagtcccagggcgacagtgccggcgcgcgtcgtcttcaggcccgcgccgcccgtagcgagcgagctgacagtgagtccaaacgatgagtagccctgacgcgctcgacaccgcaggcctggacctgacgctgaccgatacccaagccattgacgactgttggaaccgcatcggtattcatggcgacaagtcctgcccgttgttggctgagcacatccactgccgcaattgctcggtgtattccgccgccgccacgcgcctgctcgaccgctacgcactgcaacaggacgaccatcacgcgcaggcaactgccgaagcggataacgaggtggtcacccgttcgctgttgatgtttcgcctcggcgaagaatggctcggcatcgcgacccgctgcctggtggaagtggcgccgttgcagccgatccactcgctgccgcaccagcgctcccgggcgctgctgggcgtggccaacgtacgcggggcgctggtggcatgcctgtcgctggtggaactgttgggcctggacagcaccagtaccggcgccagcggcgggcggatcatgccgcgcatgctgatcatcgccgcccaggacgggccggtcgtcgtaccggtggatgaagtagacggcattcacgccatcgatgagcgcaccttgaaggccgcgtcggtgtccggcacccaggccagcgcacgctacacccaaggcgtgttgcagtggaaaggccgcagcctgcgctggctggacgaagcgcaattgttgtccgccgtgacccggagcctcgcatgacccccgaccagatgcgcgatgcctcgctgttggaactgttcagcctggaggccgatgcgcagacccaggtgttgagcgcgggcctgctggcgctggaacgcaacccgacccaggccgaccagctcgaagcctgcatgcgcgccgcgcattcacttaaaggggcggcgcggattgtcggcgtggatgccggggtcagcgtggcccacgtcatggaagactgcctggtcagtgcccaggaaggccgcctgtacctgcaacctgaacatatcgacgcgttgctgcaaggcaccgacctgctgatgcgaatcgccacgccgggcaatgacgtggggccggcggatatcgaggcgtacgtagcgctgatggagcgcttgctcgatccctcgcagccgattgccacgcccgtgccaaatcccgagcccatccccgcgccgcgggttgacgcattgctgctggagcccgagctggagcccgcgccggtcagcagtgaagcgccgcgccagagcaaacgcatgacagaaggcggcgagcgtgtgctgcgggtgacggctgagcgcttgaacagcctgttggacttgtccagcaaatccctggtggaaacccagcggctcaagccgtacctggccagcctgcaacgcctcaagcgcattcagagcaacagcttgcgtgcactggatgccctggatggccagctaaaatccctggatctgaacctggaagcccaggaagccctggccgatacccgtcgcctgctgagtgaagcccaggccctgctggcggaaaaaaacgccgagctggatgagttcggctggcaggccggccagcgcgcccaggtgctctacgacaccgcattggcctgccgcatgcggccgtttgccgatgtgctggccgggcaggtgcgtatggtgcgtgacctcggtcgcagcctgggcaagcaagtgcgcctggagattgaaggcgaaaagacccaggtcgaccgtgacgtgctggaaaaactcgaagcgccgctcacccatttattgcgcaatgcggtcgaccacggtatcgaaacccctgagcagcgcgtgttggcgggcaaaccggcggaaggcttgattcgcctgcgggcgtcccatcaggccgggctgctggtgctggagctgagcgatgacggtaacggtgtcgacctcgagcgcctgcgcggcaccatcgtcgaccggcacctgtcgccggtggaaacggccttgcgcctgagcgaagaagagctgctcacgttcctgttcctgccggggttcagtctgcgcgacaaggtcaccgaggtgtccggtcgtggcgttggcctggacgcggtgcaacatatggttcgccaactgcgcggcgcggtggtgctggaacagacagcagggcagggtagccgcttccatctggaggtgccgttgaccttgtcggtggtgcgcagcctggtggtggaagtcggcgaagaagcctatgcgtttcccctggcgcatatcgaacgcatgtgcgacctggcccccgacgacatcgtgcagttggaaggccgccagcacttctggcatgaaggccgacacgtcggcctggttgccgccagccagttgctgcagcgcccgccggggcagaccccttcagataccttgaaagtggtggtgatccgcgaacgcgatgccgtgtacgggattgccgtggagcgctttatcggcgagcgcacgttggtggtgttgccgctggatgatcgcctgggcaaggtccaggacatttctgccggggccttgctcgatgacggcgcggtggtgttgatcgtcgacgtcgaagacatgctgcgttcggtggataaattgctcaacactggccgtctggagcgcatcgcccggcgtagccagcaggccaccgaagcgccgcgcaagcgcgtgctggtggtggacgactcactgacggtacgtgagctgcaacgcaaattgttactcaaccgtggttatgaagttgccgttgcggtcgatggcatggatggctggaacgcattgcgctccgaggacttcgacctgcttatcacggatattgatatgcctcgcatggacggtattgaattggtcacacttttgcgccgtgacagtcgcctgcaatcgttgccggtgatggtggtttcttacaaggatcgtgaagaagaccgccgccgtggcctcgacgccggggccgactattatttagccaaagccagtttccatgacgacgccttgctcgacgccgtggttgaactgattggaggcgcccgggcatgaggattgcgatcgtcaatgacatgcctctggcggtggaagccttgcgtcgtgccttgagttacgagcccgcccatgaagtggtgtgggtggccagcaatggcctggaagcggtgcagcgttgcgccgagctgaccccggacctgatcctgatggacctgatcatgccggtgatggacggcgtggaggcgacccggcaaatcatggccgacacgccatgcccgatcgtgatcgtcaccgtcgaccgccaggctaacgtcagccgtgtattcgaagccatgggccacggcgccctggatgtggtggacaccccggcactgggcgtgggcaaccccaaggatgcggcggcgcccctgttgcgcaagatcctcaatattggctggctgatcggccagcgcggcacgcgggtgcgtgccgaaaccccgccgcagcgggtcaccggcaagcgtcaacggctggtggcgattggttcttcggccggtgggccggcggccctggaagttctgctcaaggggttgccccgggatttccctgccgccatcgtgctagtgcagcatgtggaccaggtgtttgccgctggcatggccgagtggctgagcagcgcttccggcctgccggtgcgcctggcctgtgaaggcgagccgcctcaacccggcgtggtattgctggccggcaccaaccaccatattcgcttgttgaaaaatggcacgctagcctataccgcagagccggtgaacgagatttaccggccgtcgatcgacgtgtttttcgaaagcgtcgccagccactggaacggtgacgccgtcggtgtcttgctcacgggcatggggcgcgacggcgcccagggcctcaagctgatgcgggaacaaggatatttgaccatcgcccaggaccaacagagttcggcggtgtatggcatgcccaaagcggcggcggcgattgatgccgctgttgaaattcgcccactggatagaattgcgccccgattgctggaggtctttgcaaaatgaacaaaaatctcccgccgtgctggcttgcaggtagtaattcaggtgactgcacatgaatgatttacagctcgacgacttcaagaccgacgaaaacgccgccatggtgttgctggtcgacgaccaggccatgatcggtgaagccgtgcggcgtggcctggcccatgaagaaaacatcgacttccacttttgtgccgacccgcaccaggcgattgcccaggcgatccgcatcaagcccacagtgatcttgcaggacctggtgatgccgggcctggacggcctcactctggtgcgcgaataccgcaatcacccggccaccgcgaatattccgatcatcgtgctgtccaccaaagaagacccgctgatcaagagcgcggcctttgcggccggggccaacgattacctggtcaagctgccggacaacatcgagttggtggcgcgcatccgctatcactcgcggtcctacatgaccctgttgcagcgcgacgcggcctaccgcgcgttgcgcgtcagccagcaacagttgctggacaccaacctggtgctgcaacgcctgatgaactccgatggcctgaccgggctgtccaaccgccgccacttcgacgaatacctggagctggaatggcgccgcgccatgcgcgaccagacccaactgtcgctgctgatgatcgacgtggacttcttcaagaccttcaacgacagcttcggccacgtcgagggcgacgaagccctgcgcaaagtcgccaacaccatccgtgaagccagcagccgcccttcggatttgccggcgcgctacggcggcgaggagttcgcgctggtcctgcccaacacctcgccgggcggcgcacgcctggtcgcggaaaaactgcgcatggcggtggcggcgttgaaaatcccgcacatcgccccggctgaaggtgccagcctgaccatcagtattgggctgtcgacgttgacaccggtccagggcacggactgtcggcagttgatcatggcggcggacaaggggttgtacacggccaagaacaatgggcgtaatcaggtgggcatcgagtaatcccacgcgccgctcaacccctgtgggagctggcttgcctgcgatggcggtgtatccgtcacacaagtatcgactggtacaccgccatcgcaggaaagccactcccacatttgatctctatctggctgcggatcgtgtacaaacccccgccttttcggccaagcggactgccgtttccagccgtttgccgttatactcgccggctttcaaaagttcgccaacgagtgctgcccgccatggaaatcaacccgatccttaacaccatcaaggacctgtccgagcgctccgaaactattcgggggtatctttgactacgatcaaaagcatgagcgtctgaccgaggtcaatcgcgagcttgaagatccgagtgtctggaacaaacctgaatacgcccaggaactggggcgcgagcgcgctgcgctggcacagatcgtcgataccctcgacgaactgaacaccggcctgggtgattgccgcgacctgctggacatggccgtcgaagaaaacgacgaaggcgcagtgggcgatgtcgtcgccgagctggcccgtctcgaggaaaacctcgccaagcttgaatttcgccgcatgttcagccatgaaatggacccgaacaacgcctacctggatatccaggccggttccggcggcaccgaggcccaggactgggccaacatcctgctgcgcatgtacctgcgctgggccgacaagcgcggtttcgacgcgaccatcatggaactgtctgccggtgaagtggccggtatcaagggcgcgaccgtgcacatcaagggcgaatacgcctttggctggctgcgcaccgagatcggcgtgcaccgcctggtgcgcaagagcccgttcgactccggcaaccgtcgccacacgtcgttctccgccgttttcgtctcgccagagatcgacgacaaggtggaaatcgagatcaacccggccgacctgcggatcgacacctaccgttcctccggtgccggtggccagcacgtaaacaccactgactcagccgtacgtattacccacgtaccgaccaataccgtggtcagctgccagaacgaacgttcccagcacgccaacaaggacaccgccatgaaaatgctgcgggccaagttgtacgagcaggaaatgcagaagcgcaacgccgcttcccaggcgctggaagacaccaagtcggatatcggctggggtcaccagatccgttcgtacgtgctcgatgcctcgcggatcaaggatctgcgcactaacatcgaacgcagcgactgcgacaaggtactcgacggcgatatcgacgaatacctggaagccagcctgaaatccggcctctaataccctctgtgggagcgggcttgcccgcgatcccccgccgaaggctgggggcaacgaacctgatggaatatttaaagacatgagcgaccaacaactcgacccgcaagccctgcaacaggaagaaaactccctgatcgccctgcgcaaggaaaagcttgctgccgagcgcgccaagggtaacgccttccccaacgacttccgccgcgacaactactgcgatgccttgcagaagcaatacgcggacaagaccaaggaagaactggcagaggctgcgatcccggtcaaggtggcaggtcgcatcatgctcaaccgtggctcgttcatggtgatccaggacatgaccggtcgcatccaggtctacgtcaaccgcaagaccctgtccgaagaaaccctggcctcggtgaaaacctgggacatgggcgatatcatcgcagccgaaggcaccctggcccgttccggcaagggcgacctgtacgtcgagatgaccaacgtgcgcctgctgaccaagtccctgcgcccgctgccagacaagcaccacggcctgaccgacaccgaacagcgctatcgccagcgctacgttgacctgatcgtcaacgaagacgtgcgccagaccttccgcgtgcgctcgcaagtcattgctcacatccgcagcttcctgatgcagcgtgacttcctggaagtcgaaaccccgatgctgcagaccatcccgggtggtgccgcagccaagccgttcgaaacccaccacaacgcgctggacatggaaatgttcctgcgtatcgcgccggagctgtacctcaagcgcctggtggttggcggcttcgagaaagtgttcgagatcaaccgcaacttccgtaacgaaggcgtctcgacccgtcacaacccagaattcaccatgttggagttctaccaggcctacgccgactacgaagacaacatggacctgaccgaagagctgttccgcgagctggcacagctggtgctgggcagcactgacgtgccgtacggcgacaaggtgttccacttcggcgagccgttcgtgcgcctgtcggtgttcgactcgatcctcaagtacaaccccgagctgaccgctgacgacctcaacgacatcgacaaggcccgtgccattgccaagaaagccggcgccaaggtgctgggcttcgaaggcctgggcaagctgcaggtgatgattttcgaagagctggtggagcacaagctggaacagccgcacttcattacccagtacccgttcgaagtgtcgccgctggcccgtcgcaacgacgacaacccgaacgtcaccgaccgtttcgagctgttcatcggtggccgcgaaatcgccaacgcctattccgagcttaacgacgcggaagaccaggccgagcgtttcatggcccaggtggccgacaaggacgccggtgacgacgaagccatgcactacgatgccgacttcgtacgggccctggaatacggcatgccgcccactgccggtgaaggcatcggcatcgaccgtctggtgatgttgttgaccaactcgccgtcgatccgcgatgtgatcctgttcccgcacatgcggccacaagcgtaaccgtagcgaaatccgaagccgccttttataaggcggcttttttatgtggcctgttcaagtggtgctcgtcagtgatcgttccccacgctccgcgtgggaatgcaccctgtgacgctccgcgtcacctctaaaggaagaagtgtggtgaaccgcgtaatagctcaagaaggtgccgccggcattgctgctgccgtggctgaaagcgttcagtaccagggccgcaaggccagtcggcggggcagcgagcaacgccggcaagacattctcgatgcggccatgcgtatcgtcgtgcgcgatggcgtgcgggccgtgcgtcaccgggcagtggcggcagaggcgggggtgccgctgtcggccaccacctattacttcaaagacatcgacgacctgctcaccgacaccttcgcccagtacgtggaacgcagcgccgcgttcatgggcaagctgtgggtacgtaacgaaggcctgttacgcgaaatggtcgcctatggcgacggcagcccggagtcgcgctcgcaactggccgatgacatcgcgcgcctgaccgccgactatgtgctacgccaactgaccaatcgccgcgaatacctgatggccgagcaggcctttcgccaggaagccctgctcaatccacgcctggccgaactggtacgctcccatcaacagatcttgttgcagggcaccgggcagtttttccaggtattgggttcccgtgagccgcagcaggatgccaaggtgttgacggctatcatcagtcggatggaatatcagggcctgttgggcggcgcagagcctctgaccggggaagagatgcttgaaatcctcaagcgctacatgcacctggtattggcctcggtctgacagcgttcgatgaaagcctgataacgttcaacgtttaaagaggaagcaccgggtggacgattaccagcagacgatacgcaccttgtccgatcgcattgtgctggcgcaaacaccgatccgcgtccttgatgcggtgaaatgggacgagaacattcgccagggattcctcaaggccaaaggcaaggcgatgcctgccgtagaccgtgattactacctgagccggccgctgtcgttcgattccagtgcggtgaagctagagttccagaacatcgagcgcgacatcactcgacgccttgggcaattcagtccggtggggcagatcatgcggcgcatgtgccgcgaataccggatggtggtgcgcatgcttgaagcgcgcggcaccgaggacttcggcctgatttcccaagagctgtacggcgccgcctccgatgcgttccacgctggcgacccgaccctggccgaccttggcctgatgctctccgactacctcaacaacatcgacggtcggggtgacctcaaggacgaagccaagaccctcaccgccaaagatgcggtcagcctgctgcaaacccgcctcaacaaggtgtttggcgaagccgaagagaccatccgcgtattcgagtccgacggcatcgtcgccgacgcagcggcgggcgccgactacatcaagatccgcgccgatgcgatgttcaacgaccgcgacgttcgcgccctcgaagtgcatgaagggttggtgcatgtgggcaccaccctcaacggccagaaccagccgatctgcacgttcctgtccaagggcccgccgtcgtccaccgtcacccaggaaggcctggcgatcctgatggaaatcatcacgtttgcttcctaccccagccgcctgcgcaaactcaccaaccggacacgcgccatccatatggtggaggagggtgccgacttcctgcaggtgtttgagttcttccgcgagcaaggctttgaaatggccgaaagctatgggaatgccagccgggtattccgtggttcggtgcccaccggtctgccatttaccaaggatttgtcctacctcaagggctttatcatggtctacaactacattcagctcgccgtacgtaaaggcaagctggaacaggtgccgctgctgttctgcggcaagaccacccttgaggacatgcgcaccctgcgccaattggtcgacgaaggcctggtggtgccgcccaagtatttgccggagcagtttcgcgacatgaacgcgctggcggcctggatgtgcttctccaacttcctcaaccacttgagcctggaccggatcgaggcggattactccaatatcctctgagcacagcaatgctatttgtaggagcgagcttgctcgcgaagaacgctcaggcaccgcgtttcttcagtattagcgcgttatcgttgacgatcttcgcgagcaagctcgctcctacagtgggcgtcaatcaccatgaggcttcaacggatgagaatcctcggcattttatgcctgctactcacattgaacggctgcagctccttactgttctaccccgagcccggcctgcccttcaccccggaaaaagcccacctgcaataccgcgacgtcacgctcaccaccgcagacggggtgaagctgcacgcttggtggctgccagccaaagcgggtgtgccactcaaaggcaccatcctgcatttgcacggcaacggcggtaacctcgcctggcatctggggggcagttggtggttgccggaacagggctatcaagtgctgctgctggactatcgtggctatgggctgtcggaaggcaagccatcgttgccggcggtctaccaggatatcgacgccgcattcggctggatcgacaaggcgcctgaaacccagggtaaaccgttgattattctcgggcaaagcctgggcggtgcactggcggtgcattacctggcagcccacccggagcgtcaagcccaactcaaagctctggtactggacggcgtgccagccagttatcgtgacgtaggacaattcgccttgagcacttcctggttaacctggccgttgcaggtgccgctgtcatggctggtgcccgacgccgacagtgcgatcaatgccatgccccgcgtgaccagcgtgcccaagctgctgttccacagcctggatgatcccatcgtgccggtggccaatggcatccgcctgtatcaggccgcaccgccgcccagggtgttgcaactgacccgtggcggccatgtgcagacctttgccaataaaacctggcagaccgtgatgctgcgttacctggacgacccgcagcacttcaacggcttgcgccgcctgggcgaaattccgaattaccctattcctaaagttgattcatcagagagcccgcaatgagcgaagaacgcaacatgatcccgctgattctcaccggcatcggcaccatcatcggtaccgttggctgcctgtggtactacggctacctgcactttgccaagccggaagatgcgttgctgctcagcgacttcaccatgctcaagaccgtgccgggtgaggattacaaggtctccctgaccccagcggcgcaagtggcgcagtgcgttgacggcgtgttggtgatgtttgataccgaacagaaaggcttgagcggcgtgctggtgaacaataagaagcaggctgtgcgttgcatgggccaggaaaccccgcagttgcaacagtgagcctgggtttttgcgtggtatgaaaaataccgttgagtttcccggttagtcgttcagggaccgcccgaacttttataggctggaaccatcttcgctcgtgcgccacagatgatggactgattggtttggctgatcagtccactttatttatcactctggagtacgagtttatggatggtattggcgcagcaccttcagttggcgcgggcaattcgggaggcatccagggaccttcgcaaggtcttgatcagcaaattcagcagctccgggagaaaattcaagctaaaagcggtgaggggtcccaagattccggttccggtggttccggtggctctcaaggggcgggaggcgctcagggttccaatggctcccaaggcgctgggggggatgagagtcttgaagagttgctcaaaaaactggtgaaactgatggcagaagaaaaagcggcccaaggggcacaaggcggtgaaagtggcgcatcgggccaaggccaaatccagatgggcggcggtgagagtcaaggctcgatcaactactgatcggcaaccctacaaaaacccgccttttagcggcgggtttttcatatcagcggcctcacggtcatcatcgcggatctcgtaacgaaattgtttggaacccaattgcatcaggtgccacaaaaggcaatgtaattacgcaaagtgggggcgggaaggcagtgataagaattgatgcgatttgcaatatgctggccatggccagggcgcatcaggcgttggaacgggcggatgcgcaagaacaggcgcgtaatcagttggcaggttgctcgtctgatacctcctctcataacaaaaagataacgccgccagatgaagatactgatcgcaagatcaagtttccctagtcaaaaaaaccaccgttactggtggttttttttcgtttcaatcttatccatcagcgatagatgaccggcttgggcgaccaacaggtgagcccctacttatatcaggattataccgttgggaactgatagacgtagccgaccactcttatagttgccaggagtttaaacctgggcgtatgggaaatcatttggagtcaaggaatgaggttagattcatttttcaatacagcgctcacgaataccatgggggtcatgtccaatacatggaacgctgtcacggggcagcgtatggggtggagataccctcaagtgggtaaaacctataactacaatcactatcaatcgagtcggcgtccacggtatgccggaactcaacctttgaatcgtggaaccgttcgctacatggggccgccaccgcgtactcaggcgacggcttcacagccgcctacgatcaactacgtgacctatgtattcaatactaattatgtgacggtcggtggcgtaaaatcggcgcaagtgggtgtgcatatcaataacggtaataacagcatgaatgacggtaacttcggcaattacggcaataacggtaatagcggaagccacagtggttattccaatcatggcagtaacggcaatcgtcaattgacctccaggcataggccggtcggtaatggccatgctcggcgccttcaagattgaaacaaacaatgtgactgcgttgctgtgcatattttgatgtggtttttagagtgttcgcagtggaactgctcgcagcgattctccacctaaagggacgatgcactgcgcagcatgcagcttatgtgtcgtcaatgcatacactattattaaattttgacagggaagataagatgactcatctatttggttcgcgacctgcacagtatgttgcttggcctccacgttatgctgaagagcaaccccgccattccacaccgggtcagcgggtgtggggaagtggcggcaacaatggcaattatggtaactatggcaataacggcaatagcgggcggtgcagtcactatgaaaaccatgggcgcaacggcaatgacatgatgggcgcgccggggaactaccgtcactttgaaggctatagtaattacggcagttacggtaactatggtaactacggaaataacggcaactcgggcgattccagccgttacatcaattctggccagaacggcaaccgcagcagcttcagatacttcaatgactaaagcttgaatgcgctttcatgaacggcaacgaaaaagccccgcctaaaggcggggcttttttaccaggctattgatcagttagcgacggaagaccgtggcttgaccggctggttgtcgttggagatggtcacttcaacgcgacggttcatggcgcggccggaaacgctgccgttatcggcaaccgggtattccttgccgtaaccctgggtcacgatgcgcgagatatccacgccttgctgagccagtgcacgttgaacggaagcggcgcgacgctcagacaggctctggttgtacgagtcggaaccggtgctgtcggtgtagccttcgacaatcactttacggtctgggttatcgcgcaggaactgagccagcttggtgatgttcaccaggccgctggatttcaggtcggacttgttggtggcgaacagcacgtcaccgaacgttaccagagtgccgcgatcggtttgcttggcgttcaagctgttttgcagttgcttgatttgcgcatcacgggcgtccagcagggcgcgggcacgttcgtcaccggcgtttttcagcttggcttcggattcgcgcaggacgatggtgtccttggccacttcaacgcgctggttggtcaggtaggccagttggtcgactttcttctcgtcttctttgtcgcggtaggccttgtcagccttgtccagccagtcgctggcatctttggtttccagcgcggccagcttggtggcttgcgggttggtttgcagggacgagaaattggtccgcgcattttccaggttcgcgttcggcggggtggagcaggccgccaaggcaacgctcatcgccagcagggcagggatcatcaattgtttacgcatagtcgtgtcgtcctttcaattcgatatcaggtgcgatgcagtcaagaggctgcggcttacttctgcatgattgcagctgggcgcatgccttctttacgcagttcgtcaacagccttctgggagtccttcacagcctgttgagccttggcagcctgggctttacgctcagcgacgcgggcatcccactcggcttgttcagccagttggcgagccttgtcgtagttcttgtcgtgcatggcaatctcagcttctttgagcttgtcctgggccgacttcatttccaccgccgcgtactcggtgccgccggcgctgactgcgctgttgacggccgattgggttacggcgtactgctcggttggagggttgccggcgcagccagccagaacgaagctggtgccgattgccagcgcggccaatttgagcccgcgcagatggttaaacgaggatttggcagtgctggtgttcatcgtcttcaactccattggataactcctgaaaaacatcaaaatccatcggggcgtatcgatttcgggcccgtcgataaagcacatggcgtccgttcaaacgaccgttccacacgtgatggctactggctgtgaccggaggcttttttcaaaagttcagcggatatggcgatttgcctaaaaaaatatctgactgactggtcagtgtttgaaaaatggaactttcgcggcgcgcggcggtacctccgggcccgtaaaaggcccggaatacgtgggtttaattgacgtcaataaatgtttatcagtgcttttgttcgtcagtagcggccgacaaatcgtgcaagtggcgacgggataacgtgagaaaacgtggtgtggggccgacgtcttcggaaagcgggactacgaaggaaaattttgcggtcgaggtaagccagcacagctcagcgtagcccaatactgtcttgggttgtggtcgtttccgggtgtcgatcccagcaccatttcttggtgtgcccaagcgttcgatgttaaaacgcctgtacaggattccgctcacacgatggcgagttacgcacgatggcaccacggaagaacaaagcaccaaaggttgttgaagaaggggccggcgtgagcacccgtgacgacttttctgaaacgacaaagattgagttgcttgtgagggccgcgaacctctgttcccgttgtcgtgtcttcacgattggctcaacggatgcgggtgacaggaaaaatagtatcggtgtcgctgcacatatttgtgctgctgcgagcgggccgggtgccaaacggtatgacccaactcagacaaaagcccaaagacgacatttcgataacggtatttggatgtgctattcgtgctccaagctgatcgacaacgaagagacgtttcacactgtcgctcatttgaaagagatgaaggccgttcatcaatcctacgtttcttcgctggttggtgtgattccgatggcaccatttgaggctgaaaacaaaattcgtgcggggattatcgaagcaaccatatccctgattacgaaggcaggtagtccgggaaatttcgacgtctcggcggtcgttgaaggttatgaacaatcaataaatagcattgatccaaattttaaggttgtagtcactgctacaagcggttctgtcgttcatgagctgattccgatcactgatcctgcaccagaaattcagatagtttttaatgatgacgaagccaatgcttctgctgatcaggcatggcaaaaaatgactgaagtgggggagccgattcacatacctacaaatgatttcaaattcgtaggttcaaaactattcgaacatcttaatgatgtcattgtaggtggaacccttaccctcacgcccggtaaacgacgacttgaaactagtatctactttgtgagtgatgaagccgaatttgagctggcttcaactgaatcattcatgggtaaggggtctaaacagttcgatattgcaggttctgcgttaaacggattctttacttttcgttattttattcatgatcgatataaggtagatgcaacttatacattcgacgttgctggatggttgggtcagcccatcaacaatttgaggcattatcaccgtatcaagcgagcctatgactttgttaaaaaatatccaaagtccagaatttcagtcgaaattgttctgaatggtgaacctatgcggctttgggatggaacgtatggtgactacactgagcttttcaataggttgaaaaagatcgttgaggttgctgagtgctccaaagtcatcgcctcgaaaatccctgaacagctaagattgaaaactttagacttaacgctgccggatgaacgatacatagaactctacgcccagctattcaaaggtgatgtgattcgcaagcttgattatggagaaagtattttcactgcccgtatagatgaaatagaaagcagagcaatcaaggttttctgttcagaagaacaaactgaggttgtgattgctaaatctcctataatagatttttttggtaatgttattaaattgccaagaatgtcaaaaaaagtatcgtgtttcgatctggttttcttctcgagcattagaaaagaagactggaaatctctatggtgtattggaagagcaaaccattctagtgattcggtgatttccattgcacccgatgaaattccgctgatttgcagtgatgaggatgaaatacatggatgagcttatgctgatggatcggagtcgaattcttcatgaggcacttgaacagtgtggttgggaaaatgctgatcaagtggttcagcgggttttgcgtctagatctcggtttacccgcagaagacgaatttgccgtcatctgtagctggctcggtaaatgttcacttgtccacaaattggatcaacaacaaattccgaaatcttctaaagaaacctttcaggttcctgatttgttggccgttttcaacactgataataatcaatacagagttttgatcgaagtaaaaaccaagcaggatgaaaaccttactcttagagcgaaagatcgggaaaggctaatcaagtatagtgagttgttgggtatcccgatattgtttgcttggaagcgtcacagcatttggacccttttcgatatttctctatttgagagatttaacaaaaactatcgtgtgaatttcttttcagctttgtcgaatagtttgatgagtttgctagccggtgatatgcattaccaattaggtgatggcgtggggctgcacctgaaattgcgaaaagatgaaattcatgaaagtgatgatacagagacttggaaaactaaaatagaagatgtctatttgcaggattacaatggagataaaaattacacgttttcgcctaggacgctctcgatattaaatacctgcgagctagatgaaaatactgagattgatgatgaaactatcaggcaaagttttactgtgcgttctgatgttggcaatgtcgcacatagagcaatagagactttgttgaagctgaaaaagtctgatgctgaaaataatatacattggcgatctttgcttgttgatgaatcgccccttcattcaatttccaattttcagaaggcgttggacgaagctctcaatctcaaatttgttaaatatatttttattctgcaaccacaaaaatatcctgatttcataaaggatgatgataaagctaaagggataaactgatgtctgtcattcaagttgaaaaggcactgaatgatttcgctgttaagagaatgggttctgcaattgttttgaaaggggagtggggcacgggtaaaacctatctctggaattctgtaattgcaaagaatcggtctaattttgctcgtgtgaactattcttacgtttcacttttcggaataaattcgttagctgacttaaagcgttcagtttttgagaataccgttcccagcaaaagtgccggtgatgtcactaccaaaaactctgttgttgaaaatatcaagaagttggatttcagtgatggcgttgtaggtttaagaaagattttcggctatgggcgggaagcaaaaattccctttgtcggaagctttggcggagttattgattcgattcaatactctcttgttacagaaacaatcatttgcattgacgattttgagcgtcgtggtaattctttatctgcacgggatgtattaggattggtttcaaatttgatcgagaaaaagaattgctcggtcatcttaattttgaatgaagggtcactcaaaccggatgatgagtttttcacatacagtgaaaaagtttttgattatgagattgtttttagtccttcggtgcaagaatcagcctctttggtttttagcccatccggtgaggcacgtaagatagtttcggaaaacgccattaagctgaaaataaacaatgttcgtttgctcaagaaaattgattatttcgcaggtcttctgcatgagcggctgaatggttgtaatgagcttgtgcagcggcaggcttataggacgttgcctcttgcagttctttcaatctatggcgggaattcggcaggcgtagatatcgacttcctgttgacttaccaaggtagcttatctgggtatcgtatgcctgatgatgatcgatccccagaagaaataaaattactcgcagaaatagaccttaagattgaatatttgcaagattatggattcagttccactgatgaattcgacgttgcgatcataaatttagttagaaaaggttatgctgacgatcagtcaatgcgagatttagtcgtcgcgttggaagtcaaaattaagcatgatgaagatattgctttgttacagaaagcttggaatgtcttccacgcttctttttcaaaaaatgatgatgaggtttttgccgcattcgatttagctatagatgtgtctttggtcaatttttcaataaatgatttagattcggttgcttctatttattacgatgtagggcggatcgataaaataaacagcgacatagataagtattttattgaggttgttgcaccaagtgatatacgtgaaaaaagcgatgtgtttcgctggcctgcgaatccctatattcaacagaagcttgaagagttttttgatggtctggtaatagaaaagagtctgcctgatttgataaattacgcttataacgtttctggttttgaaaatactgatgttagaaatagcgttgccaaaaaaacagaagctgaattcttagaatatttttcaagcttagatgattataatttcacaaaccttgtgcggatgtgcttgaaatgcggtcaggttagttctcctgataatgatattcaggatggttatcatgatatttttttcaagatgtaccgttgcctaatgaaaatgtgcgaaggctctccgctcaataaagccagaatgagtaaatttcaaggttacgaaaagctttacgcacagattgaaaaggaaatactctctcgccaaggtaaggttgaatagccccttgcgaggctagtgtttcgtatctaagaccctatccccgtagggtctttgaaattgcttgttcagcttcgacgtaggcgggtgtcttaccagcgtcggcaaaaatctcttcaccttcctccactctgatcacctcagtccctttgacgtagggcatggctgtttccgcttcttttatagcagagtgaatcagaccttccgtgatgatgctttgatccagtccataggcttccgcaaacgccttgattttcactaggtcttgatggcgaatggtcagggtgatctcaacaagcttcgaggtttcgtgagctttgttttcccagttgctgagcatcgttttgaaggtgtccatggggagtctccggcgtggctacatatgtcgtaaatctaagactgtctttaccactcatggttctctgaaatgatcgctaagccatgttctacgcggctttcaagagatattgagtttttcctattgcctgctcgctttcttcatacagcgggtcaccctcttcatcggtggcaatcacctgctggccctggatgtaaggaaagctggcttccagctcttccagggcggcgccgatcagctcgcccagcagttcttcaacgtggcgcttggggtacatctcggcgatggccgccagccgggcggcggcttccacatccagatgaatcgcgtattcagtcttggtcaaacgacccttggcggtttcttcccaatgctgggccagttctcgaattttcatggctacctcaataaagcctgcgagggcaggcggtgatgagtgaccagccgcctgcggaataacgcggcgacctaccgttgagactagctgtaagcgccaaggtttaaagtcgtttgcgttcggccttgtcagaaaccgacgtcggcggcactctgaaccccctgcgcgtcccggatttctggctggagattggctgatgagtgatatcgatgcacgcttgcgtgaggatgttcacctgctgggtgagctgttgggcaacaccattcgagagcagtacggcgaggctttcctcgaaaagatcgagcagatccgcaaaggcgccaaggccgaccgtcgcggagccgtttcagagaaaaccgctggcgatgagttgagcgccagcctcaaccagttgcaggagcaggagttgctgcccgtggcccgggcctttaaccaattcctcaacctggccaacattgccgagcaatatcagttgattcatcggcgcgatgagtcgcaacccgcgccgttcgaatcccgggtcttgccagagttgctggcccgtctgcaaagcgaggggcacagcaatgaatccctggcccggcaattggcgcggctggacatcgaactggtgctcaccgcccaccccaccgaagtggcccgccgcacgctgatccaaaaatacgacgccattgctgcgcaactggctttgcaggatcaccgtgacctcaccaccgccgagcgcgagcagattcgtgagcgcttgcaacgcttgatcgccgaagcctggcacaccgaagaaatccggcgcgtgcgccccacgccggtggatgaagccaaatggggctttgcggtgatcgagcattcgctgtggcacgccatccccaattacctgcgcagggccgaccaggccctgcacgccgccaccggcctgcgcctgcccctggaggcagcgccgattcgctttgcttcgtggatgggcggcgaccgtgacggcaacccgaacgtcaccgcgccggtcactcgcgaagtgctgttgctggcgcgctggatggcggcggatttgtatctgcgcgacattgatcagctggcttccgagctgtcgatgcaacaggccagcccggcgctgcacgccaaagtcggcgacagcgtcgaaccttatcgggccttgctcaagcaactgcgtgaacgcctgcgcgccacgcgccagtgggcccacacctcgttgaccagcaccaccccggcaccggccgacgtgttgcagaacaaccgcgacctgctcgacccgctgcagctgtgctaccagtccctgcacgaatgcggcatgggcgtgatcgccgatggcccgctgctcgactgcctgcgccgtgccgtgacgttcggcctgttcctggtgcgcctggatgtgcgccaggactccagccgtcactcggcggccatgaccgaaatcaccgattacctgggcctggggcgttatgaggactgggatgaagaggcgcgtatcagcttcctgacccaggaactgaccaatcgtcggccgttgctgccgggttacttcaagccgtcggcggacactgccgaggtgctcaatacctgcaaggaaatcgccgccgcaccggccgcatcactagggtcgtatgtcatctccatggccggcgctgcgtcggatgtgctggcggtgcaactactgttgaaagagtcgggcgttcaacggccgatgcgcgtagtgccgctgttcgagaccctggccgacctggataacgcagggccagtgatggagcgcctgctgcaactgccgggttaccgcgcgcgcttgcagggcccgcaggaagtgatgattggctactcggattcggccaaggacgccggcaccacggccgccgcctgggcgcagtaccgcgcccaggaacgcctggtggatatctgccgcgagcaacaggtggagctgttgttgtttcacggtcgcggcggcaccgttggtcgtggcggcggcccggcgcacgcggccatcctgtcgcagccgccgggctcggtggcggggcgtttccgtaccactgaacagggcgagatgattcgcttcaaattcggcctgccggatatcgccgagcagaacctcaatctctacctggctgcggtactggaagcgaccctgttgccgccgccgcctcccgagcctacctggcgtcacctgatggacgaattggcggcagacggtgtcagcgcttaccgcgccgttgtgcgggaaaatccgcagttcgtcgagtacttccgccagtccacgccggagcaggagttgggccgtttgcctttgggcagccgcccggccaaacgtcgtgcaggcgggattgaaagcttgcgcgccatcccctggatctttggctggacccagacgcgcctgatgctgcccgcctggctcggttgggaagcggcactgagcaaggcgctggagcgcggtgaaggtcaattgctggggcagatgcgcgagcagtggccgttctttcgcacgcgcatcgacatgctggagatggtgctggccaaggccgatgccgatatcgcccgtctttatgatgagcgcctggtgcagccggacctgctggcattgggtgcgcacttacgcgacctattgtcgcaggcgtgcgacgtggtgcttggcctgaccggccagtcgcagctgctggcccatagccccgacaccctggagttcatccgcctgcgcaacacctacctcgaccccctgcacctgttgcaggccgagttgctggcacgttcgcgtcagcaggaggctgcgcaagacagccctctggaacaggcgctgctggtgtccgtggccggtattgcggccggtttgcgcaacaccggttgaggttttttgcgtgtactcaatggcttgcggataagccgcgacgaccgcccggaaacgggcggtcgtcgtttgagggggtgggttgcgctcaggcacaccctggcgctgacgcatgtgcggcgcgggtttctcctacttttggcggcttgtatggtgagggcccgctgtgtatcttgatcagcctttggccgtttgatcggcctagaaccacatttttacgagattggccccacgcggcgaatccgagcgtcatctctataaaaaattgaggagcacatcgatgcgcgtcattctgctgggagctcccggggccggtaaaggtactcaggcaaagttcatcactgaaaaattcggcattccacaaatctccaccggcgacatgctgcgtgcggccgtcaaggctggcaccgagctgggcctgatcgccaagagcgtgatggacagcggcggcctggtctccgacgacctgatcatcaacctggtcaaggaacgcatcagccaggaagactgcaagaacggtttcctgttcgacggcttcccacgcaccattccccaggctgaagccctggtgaaggcgggcgtggagttggacgccgtggtcgagatcgcagttgaagacgaagagatcgttcagcgcattgctggccgtcgcgttcacgaaggctcgggccgcgtgtaccacattgtctacaacccgccgaaagtcgaaggcaaggacgatgtcaccggcgaagacctggtgcagcgtaaagacgacaccgaagaaaccgtgcgtcatcgcctgtcggtctaccattcccagaccaaacccctggtggacttctaccagaagctgtccgcagcccagggcaagccgaagtacagccacatcccaggtgtgggctcggtagaggccatcaccgccaaggtgctgcaagcactgagctgatcctgtgatcggcggcacagacaacggcccgcttgcgggtcgttgttgtttatactggcgcacttttttccgacttggacaccgacaccgatgagtaccctgctggccctggacaccgcgactgaagcttgctccgttgccttgctgcacgatggcaaggtcacgagccactacgaggtgatcccgcgcctgcacgcgcagaaattgttgccgatgatcaagcaactgcttgaagacgccggtaccaccctggcggcggtggatgccatcgcgtttggccgtggccccggtgcattcactggcgtgcgcatcgctattggcgtggtgcagggcctggcttttgccctggagcgtccggtgttgccagtgtccaaccttgcggtactggcccagcgcgcgttgcgtgagcacggggcgtcgcaggtggcagcggccattgatgcgcgcatggatgaagtctactggggttgctaccgtgagaccgcaggcgaaatgcgcctggtcggtgccgaagcggtgctggcccccgaagcggcgcagttgcccgctgatgccagcggcgattggttcggtgccggcacgggctggggttatggcgaacgcatcaagatgacgtgtacgcagcaggacgcggcgatgttgccccacgctgaagacctgctggcgttggcgcgtttcgcattcgagcgcggcgaagcgattgcggcggaccaggccgcaccggtgtatctgcgcgataaagtcgcacaaaccaaggccgagcgcgggattatttgacgccagaaatgtgggcattgcgcggcaaatttctccaatcgtcagaatttgcctgggtttttaaaccttttacaaattatgtgttctagttatcaccagagcatttgcgcgccatggaaagtgccgctaaattgccatcattgatgccgagtctgcatgtatgcgtatagacggtttttcctcacagtcgtaccccctcaagcgtaagccgcgcaaggcgagcgtgacggtagacgaatccgtcgaggattcaccggacttcatcgaagtacacaccgatacgccttccaaagcgcaaggcgccgcgagtgcacgtatcagcggcgttcctgcccgtcagcaagacatggtctttccccgttccatgagcaaaagcgttgccaccgccttggccagctacctgaccaccgccggctttgtcgaatgggatatggaagtgctgggtctcgatatccatatctgatgcgtttgccttattacatcggctgcccgtcttggagtgaaaacgcctggcgcgagtacctgtatccggttgatgcacgctccaacgattacctcgggctctattcccaggtcttcaacgccgttgaaggcaataccactttttacgctcgcccctcggccgccactgtgcagcgctgggccgaaatcatgcctgacgactttcgcttcaccgccaaattccccggcgatatcagccatgctggcgatttgcgtgaacaattgccggcggcagaaagctttgtcggcttgatgagcccgttgggtgagcgcgtttcaccgctgtggttgcaactctcaaagggctttacgccgccacgcctggcggagctggctggatttctcgatggcatcgatcgaccgctggccgtggaggtgcgtcatgaacagttcttcgccaagggtgatgctgagcgcatgctcaaccgcctgttgcgcgatcgcggtgtcgagcgcatctgcctcgatccacgtgccctgttcagttgcacttccacctcggaagcagtgctgcatgcccagtccaaaaagccccgggtgccaccgcgcccagcggcactgacgcagtttccccaggtgcgcttcatcgggcatccggaccttgaggccaatgacccgttcctgattccatgggtggaaaagatcgccagttggatcgaagaaggccgcacgccctatatgttcctgcacacgtcggacaaccgtctggcggcacagctggcgctacgcttccacgccaagctgatggtgcgcctgccaggtttaccgccgctgcccaccttgcatcgagaacccgtggcggagcagctcgggctactttgaggatttagccgtgggtgtggtcaaggcgttgagtgtgttgctggtgctggtgggcgcctttgcgctggctgtctggcgcggttgggtgccgatgccgtctgagtggaacccctgggcgcctttggatgtgcgagcgagccccaacctgttgacgcgctacaagctcagtcgtttacaggatgatccggcgttgtgtgaccaggtactgaacacctccggtttgcgcgtgagtcgccaggctgatacatcggccgatgcggcgtgccccttgcgcaatgtcctgcgtgtgcagggcgctgacgtggctttgagcagcagctttctcgccagttgcccgctggcggtggcgttcgcgttgttcgagcgccacagcctgcaaccggcggcccaggccgtgtttggccaagcggtgagccgagtcgagcatttgggcagttttgcctgccgtaatatctacaatcgcgccgacgggaggctcagccagcacgcctcggccaatgccctggatatcgccggttttcgcctggcggatgggcgcagcatcagcgtgctcaaggattggccagggcagggcgacggcgcgcgtttcctgcgcttggtacgcgatggcgcctgtgatgatttcaacgtggtgttgagcccggactacaacgccgcccatcgcaaccatttccatctggacatggggcgttggtgggtgtgtcgctaaggttcaggcggccaggcgcaagttgtgggtcactagcgggcgcgcccagtagtaatcgaaatccaaggccttttgctgcgccagcaattcttcttcagggtacggcgtggcggccggtggcagcaggtccagctcgaattcggcaattggcaggtgcagggggcgtggttgtggcgccgggcctggctcgggtagcggttggccggcgttcagcacaacggggcgcacccactcgctctcaaacgcttgttggcgttgctgggcgactatttcttcttccgggaacggcgtcgcggccggtggcagcagttcggtttcgaactcggcaatcggcaggaacagtggctcaggtggcacgatctcggcgtctttcacatcgcactcacgctgggtgaggatctgcgccagcaggtcggcgccttcgcggggttctaccgccgggtctgccggggcaggcgccttggcggcgagcgcgtctggcgtttcacccagctgctcggccaacgctcgggcgaagaagtcctgccacacatgactcaccccagccagcgcttgggtattgcgcaggccatagtggttgtgggtcggcagtacaccgatggaaaggggaagaatgtctgacatttttctcggtcgacgctcagctctggcaaaatacctgactgtgatttttatcggccgttgtttgccgatccttaatatttttgagcgtggcgattgatgaacgaacaaccagcggccagccgcatccaggtccaagccttggctgacagtttccaggcccgcgccgaacactgggcttcgctgctggggttgcctctgcaggtggccgatgcggatttttccctgcaagtgggggagcacggcttgcagttgcaacagcttgggcctgatgcgccagggccggtgcgggtcgactttgtcgaaggcggcgcggcgcatcggcggttgtatggcggcggcagcgggcagatgatcgccaaggcggtgggcatcgcccagggcgtgcgcccgcgggtgctggacgctacggcgggcttgggcaaggacgcgttcgtgctggccagcctcgggtgtgagatgagcctgatcgagcgccagccgttgatcggcgccttgctcgaagatggcttggcccgcgctgccgaggattttgaggtggcgccgattgtggcgcgcatgaagttgctcaagggcaactccatcgacgtgatgctcaattggcagggggagccgccccaggtgatctacctggacccgatgtttccgcatcgtgagaaaactgcgttggtgaagaaggaaatgcgcctgtttcggccgttggtgggtgatgatccggatgcaccggcgttgctcgcggcggctctggcgctagccagccatcgtgtggtggtcaagcggccgcgcaaggcgccctgtattgaggggccgaagccgagccatgcgttggatggcaagtccagccgctacgatatttatcccaagaaggcgctcaaggcttaagcggcaagcaacagcgctcatcttgctgatgcggcgagctccaaatgtgggagggggcttgcccccgatggctgcctgacagccgacaactatctccctgacaccccgcaatccaaatgtgggagctggcttgcctgcgatgacggccagctagccgacacctatctacctgacacccccctatccaaactgtgggagcgggcttgctcgcgaaggcggcctggcagtcaacaccgttggatcgtgtacatatccattcctgcggtaacggccacttagggttccgccctgacggcggctcacttttgaaaagagcgcaaaagtgagcaaaacgctcttgccccaccactcggcacctcgcttgggctcggtgtgcccgaacgcaggcttgaatccgtgggccgccgccacgcgccatccctggcgcggggcggctaacccggcgtcctgccgggttacccacgaattcaagcctgcgttcggccagcgtggtttaacggggcgcctaagatcaaaagcagatcaagagcgactcgcttcgcatcgtggttactgtcggttggtgcaacttacttaggtgtttctggaccctggctgcgataggcccgcataaacaacttcaccacgtcctgcacatgctcctcggcctcttgcgcactcaattgccctccacacccgtacaacaaccgaaagttcgccgtgcccttgagcaagcaaaagaagtgctccgcggccttgaacggtgtgtcgatgctcaaggcgccgctctggtcaatcttgccgagcaagcgctccatgccttgcagcatgcgcatggggccggcgttgaagaagatctgggagagtttcacgtcctgattaccggtggtcatcatcaggcgatgcaggtttaccgactcttcgctgttgatcagtcgatgaaagccgcgggcgatgttaagcagcaccgtctcgacgggcatgcctacgggcagctcgaagtacatcaccggcaattgctcttcgcatttggccaccaccgcagcggtgaacaacgtctctttgtcggtgaagtggctgtagaccgtgagtttcgatacgccggccgccagggcaacggcgtccatgctggtgtttgcatagcccttgtccaggaacagcgattttgccgattcgaggattgcctggcgttttgccatgtccttgggacgcccggggcttgcggtgttcagaggattgtcggacattttcacctttaatactggactggtgagtttggtattaataacataccggccagtataattattccaagctctatttgcgaaaggtccttcagcatgcgcagcgctttcctgccccttgctttgcctgtcagcctgatcttcctgttggccgcttgcggccatgaagacgcggctcagaccaccgtgcgcccggccatggtggtgcaaccgcagccttcggcgcaggcgatggacagctacccaggtgaggtgcgtgcccggtatgagccggacctggcctttcgcatcggcggcaaagtcagcaagcgcctggtggaggagggcgagcgggtcaaggccaaccagccgctggccgaactcgacccccaggacgtgcgtctacaattggaagccacccgtgcccaagtggccgccgccgaggccaatctgagcctggtacgtgcggagcgggatcgctacaagaccttgatggaccgtcagatggtcagtcggtcgcagtacgacaattccgaaaacctctaccgagccggtgaagcacgcctgaagcagatcaaggccgagttcgatgtgtcgagcaatcaggccggctacgccgtgttgcgcgcgcctcaggacggtgtggtcgccaagcgtgccgtagaggtggggcaagtggtctccgctggccagacggtgttcaccctggccaccgatggcgagcgcgaagtgttgatcagcctgcccgagcagggctttggccgcttcaagatcggccagccggtgtcggtggagttgtggagccagccagagcaacgcttcgccgggcgcattcgtgaactctctcctgccgccgaccccaaatcccgcaccttcgccgcgcgcgtagccttcaccggcggcaaagtgcccgccgaactgggccaaagcgcacgggtgttcatccaggccgacggtgtcattcccctatcggtaccgctgtctgccctgagtgccgagaacggtgcgtcctacgtttggcgtgtaaaaccggacaacacccttgaacgcacccctgtacgcattggtgcgtttggcgaaaacaccgtgccggtactcgaaggcttggccgccaccgattgggtggtggccgcaggcgtgcatgtgctccatgagggccagtcagtgcgtccggtggatcgctccaaccgtgtagtgaatctggcggccaaggagtagtccccatgggtttcaatctttccgaatgggcgttgcgtaatcgccagatcgtactgttcctgatgatcctgctggccgtggttggcaccttgtcctacaccaagctggggcaaagcgaagacccgccgtttaccttcaaagccatggtgatcaagaccaactggcccggggccacggcccaggaggtttcgcgccaggtcaccgaacgcatcgagaaaaaactcatggagaccggtgagtacgagcgcatcgtgtcgttctcgcggcccggtgaatcccaggtcacctttattgcccgggattcgatgcgttcggcgcagattcccgagctgtggtaccaggtgcgcaagaaaatcagcgacattcgccacaccttgccgccggatatccaggggccgtttttcaacgacgagttcggcaccaccttcggcaatatctacgccctgactggcgacggctttgactatgcggtgctcaaggactacgccgaccgtatccagatccagctgcaacgggtgccggatgtaggcaaggtcgagctgctcggcttgcaggatgagaagatctggatcgagctgtcgaacctcaagctcgccaccctcggcttgcctttggccgcggtacagcaggccttgcaggaacaaaatgcggtgtccaccgccggcttctttgaaacccccaccgagcgcgtgcagctgcgcgtttcaggcaacttcaagacggtggaggagatccgcaactttccgatccgcgtgggtgatcgcacctttcgcatcggtgacgtcgctgacattcaccgaggcttcaacgacccaccagcaccgcgcatgcgttacatgggcgccgatgccatcggcttggccgtggccatgcgcgacggtggcgacatcctcgtactgggcaaggcacttgaggctgaattcgcacgcctgcaaaagaaccttcctgccggtatggaactgcgcaaagtgtcggatcagccggcagcggtaaagaccagcgtcggtgaattcgtccaggtgctggctgaagcgttggcgattgttttgctggtgagctttttctccctcggcgtgcgtactggcatggtcgtcgccctggcgatcccgctggtactggcgatgacctttgccaccatgtattacctgggcatcggcctgcacaagatttcccttggcgccttggtcctggctttgggcttgctggtggatgacgcgatcatcgccgtggaaatgatggcgatcaaaatggagcagggctacgaccgcctcaaagccgcgagtttcgcctggaccagcaccgcattccccatgctcaccggcaccctgatcacggcggcgggcttcttgccgattgccaccgcgcaatcgagcaccggcgaatacacccgctcgatcttccaggttgtgaccatcgctctgctggcctcctgggtggcggccgtggtgtttgtgccgtacctgggggaaaaactcctgcccgacctggcgaagattcacgccgccaaacacggcaccgacggcccggacccttacggcacacccttctaccagcgtgtaagacggttggtggagtggtgcgtgcggcggcgtaaaacagtgattgtgctgaccttgctgctgtttatcggctcggttgcgctgtttcgcttcgtgccgcaacagttcttcccggcttccggtcgcctggagttgatggtcgacctgaaactggccgaaggcgcttccctgagcaacaccgccgagcaggtcaagcgcctggaggcgttgctcaaggagcatgccggcatcaacaactatgttgcctatgcgggcaccggttcgccgcggttctacctgccactggaccagcaattacccgctgccagcttcgcccagttcgtggtgctggctaacaccatcgaggagcgtgaaagcctgcgcacctggctgatcgaaaccctcaacgagcaattccccgagctgcgctcgcgcgtgacgcgcctggagaacggcccgcccgtaggctacccggtgcagtttcgcgtaaccggcgagcacatcgaagaggtgcgcgcgctggcgcgcaaagtggcggccaaggttcgcgaaaacacccatgtggtcaatgtgcacctggactgggaagaaccgagcaaaatcgtgtacctgaatatcgaccaggaccgtgcacgtgccctgggtgtgagcaccgccaacctgtcgaaattcttgcaaagttccctgaccggttccagcgtcagccagtaccgtgaggacaacgaattgatcgagatcctcctgcgcggcaccgtgcatgagcgcagtgaactgtcgcgtctgccgagccttgccgtgcccaccgacaatggtaaaagcgtggcgctgtcgcagattgccacccttgaatatggattcgaagaggggattatctggcatcgcaaccgcttgccgacggtgaccgtgcgggctgatatctatggcaaggaacagccagcgactctcgtgcagcagatcttgccgacgcttgccgatgtgcgtgccgaactgccggacggctacctgttggaagtgggcggtacggtggaagattctgcccgtgggcaaaactcggtgaaggccggcgtgccgctgtttatcgtggtagtgctgaccttgctgatgctgcaactgcgcagcttctcgcgcacggcgatggtctttctcaccgcgcctttggggctgatcggcgttaccttgttcctgctggtgttccgccaacccttcggtttcgtcgccatgctcggcaccatcgcgctgtcggggatgatcatgcgtaactcggtgattctggtggaccagatcgaacaagacatcaaggctggcctggcaccctggcaggcaattatcgaagccacggtccgacgctttcgcccgattgtgctgacggcgctagcggcagtactggcgatgattccgttgtcacgcagtgtgttcttcggccccatggccgtagcgatcatgggcgggttgattgtggcaacggcgttgacgttgttgttcttgccggcgttgtacgcggcttggttcaggatcaggaaggacgtggagtaaatctgtgactgttttttggtgggcccaatgggaacctttttttcaggctcaccacagagagttacctgttcgcaggtacgttatccggtggtttttatcacctggataacgtttccagaacgttcatagaggcgaaatagatatgctcctacaagcattgggtaacttttactctgggatcggcatgatgctgggcggcggtcagatgggcggcgcttgcgccaaacattcccataatgactccgtcagtcggcgtgagctttccgacgcgctaaaatcgctccaatatgatcgtccccagccgaccagtaatattacgattaacaacgccaacgccaacgcgaatagcaacgccaataccaatactcaaatcggccgttgaatgagctgatttttgatattcagccattgcaaacactctgcatccgcagagtgtttgcagcgtacgttcagtaaagggggtttaaagcgccccaaacaccttcttggccaagctggtggctgccgccgccggattcttgcgaatggtttcttcctgctgcgcaatcatcttgaacaagccatccagcgcttgttcggtcacgtagttctcaacgttggcgctcttggcatccagcgcgccaaaagctgcggccttgccggccagggcgttgtactgctgggctacgccaaccttgtcggtggctgccttgacgatgggcaggaacttggcgcgaatttcttcacggctgcttttgttcaggtactgggtggcggagtcctggccaccactgagaatgcccttggcgtcggtcacgctcatgttcttcacggcgttgaccagaattggctgggcctgggtcacggcggtttctgcggccttgttcatgctggtttccagttgcgtgacctggtcacccataccaaacattttcagcttgtcggcgactttgccgagtttgcccggcaggccgatcttcacgtccgggttgttgctgaaaccaccgggcgtcccgagttgtttcacagcaatctgtgcaccttgggtcaaggcatccttgaggccgccgctggcgtcgccctgggacaggctgcccagatccagggccatggcgttggcgccgaacagcaagccagcacacagggcggtgaggcgaagagatttgcggagcatgggcgcttccttatgacgtgggaatgatcaatgtgcggccgcatctacccgcaggcgcagcggttgtgggtcctggccgttgagttgcacggtgtgccgctcggtggtgataaacagtagcttgccgtccagctcgatgcgagcgctgaccgaataggtgtggcccggtttgacctgggccgggtcatagctcaggtgaaacggcagcggcacctggcctttgaccgggcctttctgttcggcgagggtcacggccggggcgtccatcagggacacgtcctgcaggctgacactcaaggtggcagccggcggcagggcgatgcgttgcaggtagaacacttcgccgtccaggctggccttcggggttggggccatcgagtggcaggctccgagcagggcggtcaggcccaggaggatgagttttttcacggtgcagctccttttcaacggcgccggaatccgcccggcgcctcgttcaatctagcggttttcttcagggttgacggcaaccggttcggccgcggcctcggttgcgccgtccacgcggtgcaaggccacctggcggatcgacaggcgaatatccgcgggcaatacgcgtttggccgcgccttcggccagttcgccgagcaggtcgtgatagcccagcttgccagcttcatcgcgacgtagcacatcttgctccagcaacgtctggatgaaatgtcggaaaaggctcttgtcgaagaattccggagcgttgaggccgtgcaggatcgacaggcgctgggccatgatcgtgcacaggtcttccagctcttcggcgctgatactgttctggccgctgttgagcagcaacgagatcgccatgtagaagcgttgcagggtctgggcgatgctcttggacagcagcgtcagcagcacaaagtgccgcgaactcggcgccgggcgcaggtacacggcgttttcgaagcgcagcaggccttgttcaacgaacgcgtccagccattggtcgaccacgctgtccaagtcttccagcgaccagcggataaacagctccgattgcaggtatgggtaaagcgcgtgggtgtagcgcaggatctgctcgcggctcatgcgcgaactgctctggaagaagctcgccagcaacgctggcagggcgaagatgtgcagcacgttgttgcggtagtaggtcatcaggacggcattctgctcatccagataaacgattttacccagggcatcgctctgctccgacaacaggttcatgtccttgacgtgcttgatcagcgccaggccatcgccttccggcagggtggtgtggggcgagtagggcacgcggcgcaacagcgccaggtacaggtccaactggcgggccatggcttgttcatccagggccaggcgggtggtagatagcagcgccagcgccaccaggttcaccgggttcaccgcagcggcttcgttcaagtggcgcgccacctgttcgccgaggcgattggtggtctcgttgagccaggccggtttgtagttcggccccagttcctgggcgcgccagtccggttgttcggcgtcgaggaattctgccagtttgatcggctcgccgaagttgactgccacttggccgaagcgttgcttgagcgcgccgaccactttgaagatgtcgaagatcgactctttctttttgctcgcgccacgcagttcgcccaggtaagtgcggccttcaagcacgcgctcataaccgatatacaccggtacgaacacgatgggcatgcgcgaggagcgcaggaagctgcgtagggtgatcgccagcatgccggttttcggttgcagcatgcgcccggtgcgcgagcggccgccttcgacgaagtactccaccgggaagcccttggtaaacagggtatgcaggtattcgttgaacaccgaggtgtacagcgggttgcccttgaaagtgcggcgcatgaaaaacgcaccgccacggcgcagcaggctgccgatcaccggcatgttgaggttgatgccggcggcgatgtgcggcggggtcaggccgttcttgaacagcaggtaggacagcagcaggtagtcgatgtggctgcggtggcaaggcacgtagatcacctcgtagccctgggccacctgttgcacgccttcgatgttattgaccttgatgccgtcgtagatcttgttccagaaccagctcaataccacttccaggaagcggatcgcggtgtaggtgtagtccgaggcaatttcgttgccatagcgcagggccagcgccttggctttttccggggcgatcttttcgcgttcggcttcatccgcaatggcttggcgcaccagcggcatgttgaccaggcccttgaccagattacgccggtgggacaggtcggggccgatcaccgccgtcttcaggttacgaaagtgcacacgcaggatgcgctgggccatgcgcacggtacgttcgtggcctttattgtgctcgatcaattcacgcaggttgataggcgcggagaattgcacgcgggtcttgcgccccaggatcaggatgctcaacagccggcgtagacgcccagtgaccgcccagctgtcggcgaataacaacttccacgggctggactcgctttcgggggattggccccagaacacgctgaccggaatgatttgtgcattctcttcggcgtgttcggtgagggtgttgaccaagcgcgtcagagttgggggcgcgccgcgcttgtcttggcggccgagccaatccgggtctggcgtgaggtagaagaacgccgcgggctccatcaacggccccaccgataccggcagcaccgggcgcggcagtccagccttggtgcactcggcatcgaccaccgccaactcggtgagggaaggtgattgcaggacgtagaaaaccggccggctgcggtccaggttaagggtgagggacgactggttgatcgtctctgagcgaacccagaggtacaacagtcggcgcaaggtgccaaacaccagacggcggaacggggagcgggtcataggcgaactgcttcaagtggaaaaaaccgagcaggcgctcgggcgggtagtgtgccgtattcgccgaaaatcggcaaaaaagcagcgatgtaaagttgagttgatggtttttgagcctgtcttatactcggcagttcaatgcgagcgactcaacaataaaaaaaccagtgggagtgaacagatgacaacgcgtgaaaccggcaatgtgaagtggttcaacgatgcaaagggctacggctttatccagcgtgaagatggcaaggatgtgtttgtgcactaccgcgccattcgcggtgaaggccaccgctcgttggccgagggccagcaggtggagtacgccgtggtgaccggcgagaagggcttgcaggcggaggatgtggtgggcctgtaaccactttgttttgctaacccaatcaactgtgggagctggcttgcctgcgaaggcatcactgtggtctgactgatagaccaaggtgtctgcatcgcaggcaagccagctcccacattgattgggttagcaatccgctgtcaggcggttttccacgtgatctcttcttcaccgtctgcgctgatgcgaatccagcgatcagcgctttcttcaccctcttcttcaacccaggtgcccggcgcgcagcgcacttcaacattcagcgcggcaaacgcggcgcgggcgcaggcgatgtcgtcgtcccacggggtctggtcgctttcaaggtacaggctgttccatttgcccaccgccttgggcagccaggtcaccggcacgctgccggccttgcacttgtaggtctggcctttctggacccagtcggtgcacgggcccagggcggcgcccagccaggcggcgatggccttgtgatcgacgtcggcgtccttcaggtaaatctcaatatcgggttggcgcatggatgttcctcgttgcgggattcgaaaatccattcgcggatgggtaaaaatcggtcattgaagcacgaaataatcgtagcgcatcgacaccgtgacctgcagcggctcagccgcctcgatcacctcgtggcggcgctcggcactggcccgccagccgtggggcgtcatcgccagcaggttggcgcggtccttgggttcggccaggctcagggtgaattccagggtttcactgtgcgccaggtgcatgccatccggcaccagggccaggtgtttgtcatcggtgtattcacgcacttcgtcgtacaggcgctcgcgcagttccatcaagtggccgcgggtggggccgactttcatcaagccgccgccggggctgagcaggcgcttggcctcttgccagtccaacgggctgaacacgctggcgaggaactggcagctggcgtcggccaatggcacgcgggccatgctggcgatcaaccaggtcagcgccgggttgcgtttgcacgcgcgcttgaccgcctctttggagatatccagcgcgtagccatcggcattgggcagggcctgggcgatttgcgcggtgtagtaaccctcgccacagccaatgtccacccagcgctgcggtgcacgctcggcggccagttcggccaggcgcttggccaccggggcgtagtgcccagcgttgaggaagtcgcggcgcgcttcgaccatggccaggttgtcgcccgggtcgcggctgttcttgtgctgcaccggcaacaggttcaggtaaccctggcgtgcgcggtcgaagcggtgcccggccgggcacgccacgccattgtccaaggtattgagcggtgcgctgcaaatggggcaggcaagcatcaggcgagcaacttgatcagggtctggtagtagatttcggtcagcacatcgaggtcgctggccaggatgcgttcgttgacctggtggatcgtcgcgttgaccggccccagttcgaccacctgggtgcccagcgtcgcaatgaagcgcccatcggaggtgccgccgctggtggatgccttggtctcacgcccggtgatcgccagaatgctggccgacaccgcatcgagcagagcgcccggctcggtgaggaacggcaggcccgacagcgcccactccacatgccagtccaggccatgcttgtcgagaatggccgcgacccgttgctgcaggccctcgacggtggactcggtggaaaaacggaagttgaacaccgccgtcaggtcacccgggatcacgttggtggcgccggtacccgagttgaggttggaaatctggaagctggtcggcggaaagaaggtgttgccgtcatcccaatgttcggcggcgagttcggccagggccggtgcggccaggtggatcgggttcttcgccaggtgcgggtaagccacgtggccttgtacaccgcgcacggtcaaggtggcaccgagggagccacggcgcccgttcttgaccacgtcacccaccaggctggtgctcgacggctcgccgacgatgcaccagtccaggcgctccttgcgtgcggccaggcgttcgatcacggccttggtgccatggtgcgccgggccttcttcgtcgctggtgatcaggaaggcgaccgaacccttgtggtccgggtagtccgtgacgaaacgttccgctgccaccagcatcgccgccaggctgcctttcatgtcggccgcgccacggccgcagagcatgccgttttcatcgatcagcgcgtcgaacgggtcgttctgccaggcctgcaccgggccggtcggcaccacgtcggtgtgaccggcaaagcacagcaccggaccttcatgcttgccatgggtggcccagaaattgtccacgtcgaagatgcgcatcggttcaagcgcaaaaccggcgtcgcccaggcgctgcatcatcagcttctggcaatcggcatcgaccggcgtgaccgacgggcgacggatcaggtcgatggcaagttgaagggtcggcgaaaggtcggcatgggccgtcatggggggaactccggaaagcgtgtgatggggcgcaggacgaatgtggaaatacagagcctggagcgacgcaactccaatgtgggggctggcttgcctgcgatagcatcgctgcggtgtgcctgtcagaccgcggcgtctgtatcgcaggcaagccagctcccacatagaattgggccaggccaagcctcacaaaagggccgttatcttatagcaaaacggcggccaagggccgccgtttagtgcattgcgtcactttttacgccgccggtgcgggctcgggcgccgccgaaggtttgggcagcgacgataagaacgccatgatcagcgccgccacatagggcagcgactgcaccagcaacatcaccacccagaagcgcatgtcgttgctcggcaggccttgcaccaggtagatccccagcgccgcgccccacagcagcagcatgatgaacatttcttcgcgggcttcggaaatggccacccagaagccgtggttatcggcgtttttcggcgtgcgaaagaacggaatgctggtggtgaagaaaccatacagcaccgccttggcgatggtatgggacaacgccaaaccggccagggccgcgcagaacgcatctttcaagttcacgcctaccgcacgacggtagaggaagatgatcttgccgaccttgaacacgaacaacgccaacggcgggatcgcgaaaatcagcaatggcgggtcgacccgagtcggcacgatgatcatcgccgcagaccacaacagggcgccgacggtaaagaagatgttcataccatcggccacccacggcaaccagcccgcgaggaagtggtagcgctgaccgcgggtcagctcggtgtccttgccacgtatcaggctggcggtgtggcgcttgatgatctggatcgcgccataggcccagcggaaacgctgtttcttgaagtcgataaaggtatccggcatcaaacccttgccgtagctgtcgtggtagtacgccgccgacaagcctttctcgaacacacgcaggcccagttcggcgtcttcacagatgcaccagtcggcccagcccagctcttcgagcaccgagcggcgggtcatggtcatggtgccgtgctggatgatcgcgtcgcggtcgttacgggtgaccataccgatatggaagaagcccttgtattcggcgtagcagagcttcttgaaggtgctttcgttctggtcgcggtaatcctggggcgactgcaccacggcgattttcgggtcggcgaagtgcggcaccatgtgcttgagccagttgggcgatacgcagtagtccgagtcgatcaccgcgatcacttcggcatccttggcggtgtgcgggatcaggtagttcagcgcgccgcccttgaaaccggccaggggcgcgacgtggaagaacttgaagcgcgggcccagggtttcgcagtaatcgcgcaccggctcccacaccgccgggtccttggtgttgttgtcgatgatcaggacttcgtagtccggataatcgagggcggccagggcgtcgagggtctgtttgaccatttccggtggctcgttgtagcacggcacgtggatcgacaccttcgggcggtagtccgagtcgccttccacgggcaggaattcacgccggcgcttgtgagtccacactgcttctgccagttcgtgggcttcggtcagcaacacgataaacacacccagggcgccgagcgcgagcaacacgccaacggtcacgctgaaccaggtgctgtattgctggctatagtcgtagccgatccacaccagcaccgacccgcaaaggaacgcaataaaggtcaggaaggtacggccacgctggcgcagggccgagccgtcgatcatcaacagggtcagggacagcagcgcaagcaccaccgaaccgatggccagtacccgccattgcggaatcgccaccaccgggccatcaaagttgaatttctgctggcgcgcggcgttgaacacgccccaatacgcgcccgccgagccttcgtcgctgaccttccacggctggtcgaaggcttcgatcacgaagtagttgtaaccctggcggttgagcttgttcaccagcgtacgcaggtaaatggcctggtctgccggcgatgattcattgccaccgcgcatacggccattactcggccagcccacttccgacagcagcagtggctttttcgggaaggctttcttcaaatccttggcgcggtcgaggacgtactggccggccttgtccatcgggatgtattcccagaacggcaggatgtgcgcggcgatcaggtcgacgtgcttggccagttgcgggttcttttcccagatgtgccattgctcggaggtggtcaccggcactttcacggcggcgcgcacacggtcgagcagcacgatcagggcttcaggggtgatttcttcccgaaacaacgcttcgttacccaccactacgcgtacgacactgcgcgaggtgttggcgatctcgatagcgcgctggatctcccgctcgttacgttccaagtccgggctgatccagatccccagggtcacgcgcaggccgaactcttcggccagcttgggaatatcccccagggggccgtccaccgagtaggtacggatgttgtccgtcagcttgctcatgatcgcaaggtcctgacgcatctgttcgtcggtagggtactggtctttctgcggatactggccctgctggaacggcgagtaggaaaaaccggagatctgatcgggccagttgggagcggtgaccgggcggttgatcagcgcccagaaaccggtgaacagcgcggcaattgccagcaccaccaccaggttgagtccaaatttacgcgatgccatggttatgtcgggttccaaagggtgcggaacgaaagaggtgtcggcctacgccgaacggcgcgcatcctacaccggcccttccctgagcgtacagcagacagagaaaagccggacgttagtctgcgaaagtccgcttaagttctttacttgtagctgcaagcgtcgaacttgtcgcggcgtagccctataatgcgcgccggtttttggggtaatgatgatgagtacagaagatccgcggtttgcaggcgtcgcccgcttgtacggccttgagggcctggaacgcttgaaagccgcccatgtggcgattgtcggcgtcggcggcgtaggttcctgggcggcggaagcgattgcccgttgtggggtgggcgagatttcgctgtttgacctggacgatgtctgcgtcagcaacagcaaccgccaattgcatgccctggacagcaccgtgggcaagcccaaggtcgaagtgatggccgaacgcctgcgcggtatcaatcccgattgcaccgtgcacgcggtggcagacttcgtcacccgcgataccatggccgagtacatcactccgacgatcgactgtgtgatcgactgcatcgacgcggtcaacgccaaggcggcgctgattgcctggtgcaagcgccgcaagatccagatcatcaccaccggcggtgccggtgggcagattgaccccacgctgatccaggtgtgcgacctgaaccgcacgttcaatgacccgctggcctcgaaagtgcgctctaccttgcgccgcgattatggcttctcgcgcactgtgacccgccattacagcgtgccgtgcgtgttttccaccgagcaactgcgctatcccaagcctgatggcagcatctgtttgcagaagagttttgtcggcgatggcgtgaagctggactgcgccggagggtttggcgcggtgatgatggtcacggccacgttcggcatggtagcggccaccaaggcggtggataagattgtggcgggggtgcgccgtccctcagagcgcatcaagcgcacctagatctcaccacccgacagagattcaaactgtgggagcttgctcccgtgacggcctgacagccgacgctgatctcactgacgcacctcgatccaaatgtgggagctggcttgcctgcgatgaagccctgccagccgacggcaatctacctgacaccccacgatctcaatgtgggagcgggcttgctcgcgaaggcgccttggcagtcaacacagttggattgtgtacatatccattgctgcggtaacggctacttagggttccgctctgacagcgggtcactttnnnnnnnnnnnnnnnnnnnnnnnnnnnnnnnnnnnnnnnntcaaaagcagatcaagatcaagagcggctcgcttcgcatcgtggttaccgtcggttacctatggccatcgcaggtaagccagcttccacattaatttctatgtacgcgtcaggtctcgcatgcgttgcagtacggcattcaaaccattactgcgcgacggcgatagctggcgcgacaagcccagttgattgaaccagtcaggcaggtcaactgcttgcaattcatcagtcgacaacccattgacccgcgccagcagcaacgccaccaacccccgaatcatccgcgcctcactgctcgcagcaaactgccaatggccgtcctgcaaacgccccaccagccacactaggctttcgcaaccgtgcaccaggttggcgtcgaccttttcgtcatcagccagggcgggcaagcgttcaccccattgcatcagcatccgcgcgcgctgttcccaactgcctacggcctggaaagcttccagtgcggcttgtgcttccagcggcaagctcatcgcagcatgtccagtgcctggtccagcgcttcaaaaaagcgctccaggtcgtcggaatcgttgtagagcgccagggacacccggattgcgcctgacagattcatcgccttcaacagcggcatcgcgcagtgatggccggcccgcacggcaatgccttgctcggtcagcaagtgggcgaggtcggcgttgtgcacgccctccaccacaaaactcaccagcgccacttgcggcgagcccagcacgcgcacgccattgcgtgccttaagcccacgcagcaggtagtcatgcagggcggcttcgtgggcgagcaccgccgaagcatccagcgagctcaggtaatccaggctcgcgcccaggcctatcacgctggcaatcggtggagtgccggcctcgaaacccagcggcgcggggcgaaagctggcgctgtgatagtccgcctgttgcaccatctcgccgccaaactgccagtggcgcaggtgatgcagggcttcattacggccatacagcacgccgacgccgtccgggccgtagagtttgtggctggaaaacacgtagaagtcgcagcccagggcctgcacatcatggcggccatggacgatgccttgggcgccgtccaccaccgttagggcgccgtatgcctgggccagcttcagcaaggcttgcagcggctgccaggcaccgagcacgttggacaactggctcaccgccagcaggcgcgtgcgtgggccaatcaagctggcggcggcgtccaggtcgatcacgccgtcatcgcccaggggcaagaccaccagcgtgagtgcgcggcgtttggccaattgctgccagggcaacaggttggcgtggtgttccagggcgctgatggcaatctcatcgcccgcattgaataagtgctccaggccataggccaggaggttcagcgcagaggtggcgccgtgggtaaacacgacctgcccgctgtcacctgcgttcaaccactgcgcgaccttgctgcggctgtcttcaaaggcctgggtcgcatgggccccgggcaaatgctgggcacggtgcacattggctgcgccattggcgtagtaatgactgatggcatccagcagggcttgaggtttttgcgtggtggcggcgctgtccagataggtctggtcctgccgttgcagggtggcgatggccgggaagtcggcgcgccagggggagggcacaagcatggtgatcaagactcgtataagcgagccgccccgaagatgcggcccgctagtggcatcgagtggctgcttagttgtgagcgtgcagcgcttcgttcagttcgatggccgatttgtgggttttgcactccacggcaccggttacggagttacgacggaacagcaggtctggctggccagccaactcgcgtgccttgaccaccttgaccagttggttctgctcatccagcagggcaaccttggtgccggcggtgatgtacaggcccgactccacggtgttgcggtcgcccaatgggataccggtaccggcgttggcgccgatcaggcagccttcgccgaccttgatcacgatattgccgccgcccgacagggtgcccatggtggagcaaccgccgcccaggtccgagcccttgccgacgaatacgcccgccgatacgcggccttcgatcatgcccgggccttcggtgccggcgttgaagttgacgaaaccttcgtgcatcacggtggtgccttcgcctacgtaggcgcccaggcggatacgtgccgcgtcagcgatacgcacgccggccggtacgacgtagtcggtcattttcgggaacttgtccaccgagaacacttccagcaggtcgccacgcaggcgcgcttccagttggcgctcggccagctcattgatgtcgatggcgccctggctggtccaggccacgttcggcaactgcgggaatacaccggccaggctcaggccgtggggcttgaccaggcgatgggacagcaggtgcagcttgaggtaggcctcaggcgtggaggtcagtgcggcgtcttcggccagcagggtcgcgaccagcggcgtgtggctttcagccaggcggctgagcagggcggcctgggcagtgtcgacgcctttgagtgcgtcggccagttgcagggcctggctcacggtgaaggtgatcgcctggttgccttcggtgtaaccgaggatcggtgcgatggcggcaacgatttcagccgatgggttgagcaagggttgtgcgtaaaacacttccagccaagcaccttggcggttctgagtgccgacgccgaagcccaggctgaacagggaattggacatgctgttacctctacaaaaatggaaggctggcctacttgagggccgccgaataactatctggcttgaagccaatcagggttctgtcaccgagatcgagcaccgggcgcttgatcatcgagggttgtgcgagcatcagttcaatggctttcgactgatcgagatcggctttgcgttcgtcttcgagtttgcgaaaggtggtgcccgcacggttcaaaaccacctgccaaccgtgctcgttgcaccattgggtcaagtgttcgcggtcgataccggccgttttgtagtcatggaactcatagctcaccccgtgctcatcgagccaggtgcgcgcctttttcatggtgtcgcaggctttaatgccgaaaaggtgcaaggttttgcttgaagcagtcaaggaattgcccccctttggacgcatgaaaaatgaaagatcgcggattatgccacgaccggcgggtttcggcgccgctcgtcaacagcgtgcgacttttgtgcaaaagccggtgcgcagcctaggcgagtaacatagccaggtaatatggcacttcaacggccagttgttgcctgatgtgtcgttgcaagtcgattgtccgggaaacccgcgttatgcaaaccgcctacaccgtccttatcctgctgatgctggtcagcctttcgcgcctcgtcgggcgcgtcatcccactgccgttgcccctggtgcagatcgccgccggcgccttgctggcctggcccacgttagggctgcacgtggcgctggacccggagctgttcctgtttctattcctgccgccgctgctgttttccgatggttggcgcatgcccaagcgcgagttgtggcgcctgcgtggcccgatcctgacattggcggtggggctggtgctgttcaccgtggtgggcgccggctatttcatcaattggttattgccaaccatcccgttaccggtggctttcgccctggccgcggttttgtcaccgacggacgccgtggcggtgtcggccatttcccagaaccgtttgcccaagccgctgatgcacatgctccaaggcgaagccttgatgaatgacgcatctggcctggtgaccttcaaattcgccctggccgcagcgttgaccggggtcttttccctggcagatgccagcctgacgtttgtgctggtggcagtgggcgggctggcgatcggggtggcgttgagctggctggtcggccgcctgcgcgcctggatgatcgcgcgcggctgggatgacccggccactcatgtggtgttcatgttgctgctgccctttgctgcgtacgtactggctgaacgcctgggcgcgtccggcattctctcggcggtggcggcgggcatgatgcaaagctggctcgacctgctgccgcgccagaccagcacgcgcctgctcaaccgcagcgtgtggtcgttgctggagtttgccttcaacggtttgatcttcctgctgctgggcctgcaactgccagacatcatcaaggccgtggtcagccatgaaaccacactgtggcccaccttgatgtatcgctgcctggacgtggtggcgatcttcctggtgctggtggtactgcgctttatctgggtgcagagcatctggcggctgtcggggttgctgcgccggctgcgtggcaaaagcgcgctgaccctggtgccgacggcccgttcctgctggctgttgaccgtcggcggtgtacgcggagcggtgacgttggccggtgtgatgtcggtgcccttgctgctggcgccgggccaggattttcctgagcgtgacctgctgatctttatcgctgccggggtgatcctgctgtcgctggtcgctgcctgcatcgccctgccgttactgctgcgtggcgtcgaaaaaggcccggatgaaaagcgccacaacgaagtgcgcgaggcctggaagaagaccgcggtggcggcgattcacgcactggaggctcaagaacccgccgaagctgaaacaccggacgccgctcaagcggcactggccaccgagctcaaggcgcggctgatggcggagtatcgtcaccagttggacgtgttcaatgattcggccgaagcccaggcgctggcgctgcaaatggaccagttggagcgcaagttgcggctcaaggccctgcgtgctcagcggttggagttgtatagcttgagccgtcatcaccagattggtgatgacgtgttgagggaggtgttggcggagttggatatgagcgaggcgaatttaggcacgatgaaacctggataatgggtgattctgcgtttatcacgctgaatccggagcattagcctcggaatcttttgggggtataaagcttgcgaatgatttctttgtccccctctgagagtgaatcattggccggaacgcctctgctatccttagttgcgcttggatgtataggtagtgcatgatggatcgtctgtcgtagctcgtgatcagcaggtcgtttccggtaggcagtttgaacaggttgttataaacatcctcttcatcccagttgtcgtcttgctcaaaggctttatatacagagctttctttccagttgatatcatgttccggatgctggtgttcatgctcaagacccaaggcatgcccgatttcatgcaaggctgttcgacgaaatccttttgagtcgtcgctcctgttcaagtgcatcgttggttcgtgcagcggtattttcttagcgtcggtaccaatcgctgaccagtttccattgaaaccttcgtcgtcgctgattcgaatatcgccttctttaccgtccacgactctgaattgcagtccgggagtgtgatgggcccactccctgagcgcatcgactaccagtgctttgcttttttggtctttcagatccagtgcgacggtaacaatgccgtcaggccatcgcttacttgtgtccgctataccccttttggttctgcttgtacgttcggaagccgaagtatcgttattaatgtgaggcggatagaaagagtgagtggtcgacccgggggcagttatgctcatacgctctactcatgggattgtgtcaaatagtggaaagcgagcggggattggttccataggcaaaggaaaccgcactgccttgcacagtgcggaatttaaaatgtttatggcttgcgctggataaagttgcgaatccgctcagccgcttccacacattccgccaacggcgccaccaacgccaggcgcacacgccccgcgccagggttgaagccgtccacttcccgcgataggtaagagcccggcaccactgtcacatgctcttgcacgaacaaatcgcggcagaaggcagcgtcgtcgccttgcacattcggccacaggtaaaagcccccatccgggctttgcacgtccagcaccggcttgaggatcgccagcaccgcatcgaacttctcgcggtacaggtcacggttggccagtacgtgggcctcgtcctgccaggccgcaatgcttgcaagctgggtttgcactggcatcgcgcagccgtggtaggtgcggtacagcaaaaaggccttgaggatctcggcgtcgccggccacaaagcctgagcgcaggcctggcaggttggagcgcttggacaggctgtggaataccacgcaacgcttgaagtcctcgcggcccagctcgacgcaggcgctgagcaggcctggtggcggggtttgctcgtcgaagtacagctcgctgtagcactcgtcggcagcgatgacgaaatcgtattggtcggccagggcgatgagttttttcagggtgtcgaccgggatcagtgcgccagtcgggttgccgggggagcacaggaacaggatctggcaacgtttccagatgtcgggggagacggcatcgaagtccgggttgaagccgttgctatccaggcatggcaggtagtgcggcttggccccggccaggaacgcggcgccttcgtagatctggtagaacgggttggggcttaccaccagggcgtcgtcgccacggttgaccacggtctgggtgaaggcaaacagcgcctcgcgcgtaccgttgaccggcaagatgttgcgcgccgggtccagccagcccttgggcacgttgaagcggcgttcgcaccaggcgccgatggcttcgcgcagcgccggaatacccaaggtggtggggtacaccgccatttgatcgaggttatggctcaaggcctcggcaacgaaggccggtgaggtgtgcttgggctcgccgatggacagggcgatggggcgtttgtccgggttcggcgtcacgctgccgagcagggcgcgcagtttctcgaaggggtagggctgcaactggttaagggcgttgttcatataagcctctatcacggtgagcacggaacctgtgggagctggcttgcctgcgatggcatcactgcggtctacctgacggaccaaggtgtctgcatcgcaggcaagccagctcccacagggctcctgttcacaaagttaagaattcaaatggtcagtcgggtcagctcgacaccgggttcctggctcacgctcaattgctccacgatcgccgcttgcaagcgcaggcacaactccgggtcggacagtggctggttgtcggcgtcggtgataaagaacacgtcttccacgcgctcccccagggtcgcaatcttggcgttctgcaacgacagatcgaactccaggaaaatcccgccgatacgcgccagcagccctgggcgatccggtgcgctgagctccagcactgtcactggtcgctgggcgtcgttggaaatagtcacctggggcgcaaaggcaaagtgcttgagctggcgcggcacccggcgctggatgatggtggggtagtcgtcggggttgcgcagggcttcggtgaggccctcgcggatctttttcacgcgcgccgggttgtcgccaatcgagtcgccgtcggtgtcgagcacgatgtaggtgtcgagggtgaactggctgctggaggtgatgacccgggcgtcatggatgttcaggttgagctggtccatggccgccacggtcacggcgaagaagtcgtgctggtcgggcgcgtagatgaagatctgcgtgccgccttcgaattcgcgctgggtggtttccttgatcaagaccagcgggccaccatcggcgggttgctgcaggattgcgtcactgtgccaggccacgtcgccggcggtgtggcgcaggaagtaatcgtcacccagttgcgaccagagttgctcgacgtcgtccgggtcgttaccgccgcgcaccaggatatccagggccgcactttgggtgcggcggatctgctcttcgcggtccaccgggttctccaggccacggcgcagggcgcgcttggtctcggtgtacagttggcgcaacaggctggcgcgccaggagttccacagcgtcgggttggtggcgttgatgtcggaaacagtcagcacatacaggtaatccagacgggtctcatcgccgacgatgccggcaaagtcgtgaatcacctgtgggtcggacaagtccttgcgctgggccgtggtcgacatcaccaggtggttctgcaccagccagacaatcaggcggctgtcccacaacggcagttggtggcgctggcagaaggcttcggcatccaccgcgccgatctccgagtggtcgccatgccggcccttgccgatgtcgtggtacaagccggcgaggtaaatcagctcgggcttgggcagcttggccatcagcttactggccagcgggaatttctctgatacctgggtgtactgcaacttacgcagatgtttgatcaggttcagggtgtgggcatcgacggtgtagatgtggaacaggtcgtgttgcatctgcccgacgataaaaccgaactccggcaggtagcgcccgagaatgccgtaacggttcatacgccgcaggttgcggtggatgccgatgcggcacttgaacagctcgataaacaggctggtattgcgaatatcgttgcgaaagtcgtcgtcgatcaggtgacggttttcccgcagcaggcggatggtatcggcgcgcacgcctttgatttccggctgctgcgccatcaacacgaagatttccagcatggcgaacggcgtgcggcggaacacgttgtcgttgcgtgcttcgatataaccgtcgtgcagttggaagcgcgcattgatcggctgcggcggtgcttcgtcttcgggggccaggatcacttcttcgaaatgctggatgatcaagtcgctgagctgggcaatgctcatgaccaccctgtagtactgctgcatgaagctttcgatgctggtcttcgcgtcttcgccctcaaagcccagcagggtggcgatagagcgctggtgatcgaacagcaggcggtcttcggagcgcccggccagcatgtgcagggcgtagcgcaccttccacaggaactcctgggacgaagccagcagagtgttttcgctctccaccaggaagccttcgccggccagggcgcgcaggttcagcgtgccgtattgacggcgcgccacccacaaaatcgtctggatatcccgcagcccgcccggtgagcctttgacgttgggttccaggttgtattcggtgtcgttgtacttgtggtgccgggctttttgctcggcgcgcttggccaggaagaactccttgctcggccacatatgtgcggtgctggtgacttcgagcatgcgctggcgcaggcgctcggggccgcagatggtgcggctttccatcaggttggtgaccaccgtcaggtcggcacgggcctcttcggcgcattcgtccaccgagcgtacgctctggccgacttccaggccgatgtcccacagcaacgtcagaaagcgctcgatggaatcgcgaaaggtctcatgatcggcctggtccagcaggatcagcaggtcgatgtcggagtaggggtgcagttcgccgcgaccgtagccgccgaccgccaccagggcgatatcggcgtcgaaactccagttgaactgctcccaggccttttgcaggatgttatcgacgaaccaggcgcggtcttcgatcaggcggcgaatatcccggccgctgcgaaagcgcgcatccagaacctcgcgggcttggcggatggccttcttgaaggccgcgatagggcttgccttcaatgccagctcggcctggaactggccacggtcgaagagttcgggatccacctggggcatcgatcggctttcctttctatctatcagtcagtcacaacacgctgtgggaaaacctgggcaaccttcaggccgaaacgcgtgggatggtgtcgtcggcgcgcagggtgaaaatctcatagccggtgtcggtgaccagcagggtgtgttcccactgggccgagagcttgcggtccttggtgatggcggtccagccgtcgcccagcaccttggtgtcggccttgccctggttgatcatcggctcgatggtgaaggtcatgcctgccttgagttccatgccggtgccggcgcggccgtagtgcaggatctgcggctcttcgtggaacactttgccgataccgtggccgcagaattcgcgcaccaccgagaaaccgttcttttccgcgtgcttctggatcacttcaccgatgtcacccaggcggcagccgggcttgacgatttcgatggccttgtacatgcattcctgggtgacctgggacaggcgctcggcccacaccggtacattgccgacgtggaacatgcggctggtgtcgccgtggtagccgtccttgatcaccgtgacgtcgatgttcagggtgtcgccgtccttcagtggcttgtcaccgggaatgccgtggcagaccacgtggttgatcgaggtgcagatcgacttggggaagcctttgtaattcagcggggcagggatggctttttgcacgtcgactatatagtcgtggcagatgcggtccagcgcttcggtggtgacgccgggcttgacgtgttcggcgatcatttccagcacgtcggcagccagtttgccggcaacgcgcatgcctgcgatgtcttcggcggttttcaaggtaacggtcatacaggctctctctagcgcgacgcgctgaaatcaatacggttcacgggggcgcgacaaagggttacagcattcgcgcaagtcccaaaaaacgcgattctaacagacgatgctggcaaatcatgcgcatctggtgatcgcttctctctatgaggtagaggcatgttggctgtattcaagggcttacgcaaagacgacgaccggcaagtgtgattgcgggtttcgtttttgccgatgctgtggtataaaatgcgccgctttccggggataccccgcaaagcttaaatccacacacgtgtcgacacgatgacctgggtgccggaggccttgatgccgctggttggtcattgggatacgtggaggccaaacccgacttattaaggaactatcatgtcccaagtcaacatgcgcgatatgctgaaggccggtgtgcacttcggtcaccagacccgttactggaacccgaaaatgggtaagtacattttcggcgcgcgtaacaagattcacattatcaaccttgaaaaaaccctgccaatgttcaacgaagcactgactttcgtagagcgtctggcccagggcaaaaacaagatcctgttcgtcggcaccaagcgttccgctggcaagatcgttgctgaagaagcagcacgttgcggttcgccgtacgtcgatcaccgctggttgggcggcatgctgaccaacttcaaaaccatccgtgcttccatcaagcgtctgcgtgaccttgaagtacaagccgaagacggtactttcgccaagctgaccaagaaagaagcgctgatgcgctcccgtgacctggaaaagctcgatcgttccctgggtggtatcaaggacatgggcggtctgcctgacgcactgttcgttatcgacgttgatcacgagcgcatcgcgatcactgaagccaacaagctgggcatcccggttatcggcgtagtcgataccaacagcagcccggaaggcgttgactacatcatcccaggcaacgatgacgcaatccgcgctatccagctgtacatgggttcgatggctgacgctgtaatccgtggtcgcaaccacgttgctggtggtaccgagcagttcgttgaagaagctccggtagctgccgctgagtaattgacgccctggcgttgactcagtaagcaaaaagggggcttggccccctttttgccacctcgaaaaccatttgtcggcagcgcagctacatcatttgtaacgtgcagcggcctacaacggagattcgggaagaattgatcgcccgtttgatcgggtggaatggttgaaaacctatccaagaggattttgaaatggcagagattactgcagcgttggttaaagaactgcgtgagcgtaccggcgaaggcatgatggattgcaaaaaggccttgaccaaggccggcggcgacatcgaaaaagccattgatgacatgcgtgcttccggcgccatcaaggctgccaagaaagcaggcaacgtggctgctgaaggcgctatcgctctgaaagaagacggcaaatccgccgttctgctggaagtgaactcccagaccgacttcctggctctgcaggacgacttcaaggcattcgttgctgccagcgttgaaaaagcgttcgccgagaaaatgactgacgccgctccgctgatcgaagctcaagaagctgatcgcctggtactggtcggcaaggttggcgaaaacgtcaacatccgtcgcctggttcgcgttgaaggtgatgtggttggtggttacctgcacggcaacaagatcggtgttgcagttgttctcaaaggcggcgacgttgagctggctaaagacatcgcaatgcacgttgctgcaagcaaccctgagttcctgctgccttcggaagtgtctgccgacgcaatcgaacgtgaaaaagctgtgttcctgagcctcaacgccgacaagatcgccggcaagccagagaacatcgttgaaaacatgatcaaaggccgcatcagcaagttcctggctgaagcaagcctggttgagcaggcgttcgtcaagaaccctgaaatcaaggttggcgaactggccaagaaagccggtgctgaaatcgtttccttcacctacttcaaagtaggcgaaggcatcgagaagccggtcgacaacttcgctgaagaagttgctgcccagctggctgccgccaagcaataagacagttccaaactgtcgccgaaagaggctgcccgctcacgcgcgcagcctcttttcaaatgggaaggccaattttatttggtttcctctcggaactggcttacaaagccgtgttccgatggcgctgtgacagcgtccagctagagtgaacgcaagccgtaaaacggctcgccaagaatttttaaaaaatacgccgcaggagagattcgcaatggctcagcagggcagtggttatcaggctcgctataaacgcattctactcaagctcagcggcgaggccctgatgggctcggaagagttcgggatcgaccccaaggtgcttgaccgcatggcgctggaagtcggccaattggtcggtatcggcgtgcaggtcggcctggtgattggtggtggcaacctgttccgcggtgcggcactcagtgctgccggtatggaccgggttaccggcgaccacatgggcatgctggccactgtgatgaacgccctggccatgcgcgacgccctggagcgcgccaacatctcggccatcgtgatgtcggctatttccatggttggcgtgaccgatcactatgatcgccgcaaagccatgcgccacctgaactccaaggaagtggtgatctttgccgccggcaccggtaacccgttcttcaccactgactcggccgcatgcctgcgtgctatcgaaatcgatgccgacgtggtgctgaaggcgaccaaggtggatggcgtatacactgcagacccattcaaagacccgcatgccgagaagttcgatcatctgacctacgatgaagtactggatcgcaagctgggtgtcatggacctgaccgctatctgcctgtgccgcgaccacaagatgccgctgcgcgtatttaacatgaacaagcccggcgccctgctgaatatcgtacacggcggcgcagaagggactctgatcgaggaaggccaacaatgatcaacgaaattaagaaagacgcccaggcgcgtatgcagaaatctctggaatccttgagccacgcctttggccagatccgtactggcaaggcgcacccaagcatcctgggcagcgtgatggtgccttactacggttctgacaccccgctgagtggtgtggccaacgtgaccgtgaaggattcgcgtaccctgcaagttgtggcttttgagcgcagcatgctcgctgccgtcgacaaagctatccagagcgccggcctgaacctcaacccgaccaacctgggtgagttgctgctgatctccatgcctgccctgaccgaagaaacccgcaagggcttcaccaagcaggcgcgcagtgccgctgaagatgcgcgcgttgccgtgcgtaacatccgccgcgatgcgttgggcgacctgaagaagctggtcaaggacaaggaaatcagcgaagacgaagagcgccgtgccgtcgctgatatcgacaagctgaccaaggacgccgaagcccagatcaccaaggcgaccgaagaaaaagaaaaggacctgatggccgtataaggggtcaggacgccttcatggaaaagaccaagcagactgtgccctccgtggtgccgcgccatgtcgcgatcatcatggatgggaataatcgctgggcgaaaaaacgctttatgccgggtgttgccgggcataaagcgggtgttgacgcggtaagggcggtgattgaggtgtgcgccgaggccaaggtcgaagtgctgaccttgttcgccttctccagtgagaactggcagcggcccgccgatgaggtcagtgccttgatggacctgttcttcaaggccctgcgtcgtgaggccaagcgcctcaatgacaacaacatcagtctgcgcatcattggtgatcgctcgcggttccatccggaactgcaaacggccatgcgcgaagccgaggccatcactgccggcagtaaccgttttgtgttgcagatcgcagccaactacggcggccagtgggatatcgcccaggctgcgcagcggcttgcccgcgaagtgcaggccggtcatctgcgcccggacgacatcacgcccgaactgttacaaacctgcctggtgaccggcgacctgccgttgccggacttgtgtattcgtaccggtggcgagcatcgcatcagcaatttcctgctgtggcagttggcctacaccgaactgtacttctccgacctgttctggccggacttcaaacacgatgccatgcgtaatgcactggccgatttcgcttcccgtcagcgtcgcttcggtaaaacgagcgagcagatcgaagctggagcccgggtttaaatgcttaaacaacgaatcatcacggcgctgatcctgctgccgattgccttgtgcggttttttcctgctcgacggttccggctttgcgctgttcatcggcctggtcgtgactcttggggcctgggagtgggcgcgcctggcaggcttcgtcaaccaattgccgcgtgtggtctacgccgctgtggtcgcgctgttgttgttcttcatgtacatcctgccggacatcgcgccctgggtgctgggggctgccgtgttgtggtgggcgctggcgactttcctggtgctcacctatccgcgcaccagtggccaatggtccagcgtggcctgcaagctggtgattggcctggcgatcctgttgccggcctggcaagggttggtggagatcaagcgttaccctcttggcaacgagttgatcctggcggtgatggtgttggtatggggcgctgacattggtgcctacttctcgggtcgagcctttggcaagcgcaagctggccccggccgtcagcccaggcaagagctgggaaggcgtatacggcggcctggctttgacgctgctgatcaccctggtggtcggtgtggtgcgtgactggtcggtaaaggaagtactcctggccttgctgggggcggctatcgtcgtgttcatctcggtggtgggcgaccttaccgagagcatgttcaagcgtcaggctggcatcaaggacagcagtaacctgctgccaggtcatggcggtgtgcttgaccgtatcgacagcctcaccgccgcgctgccgatttttgccgtgctgttgtggatgatcgcttcgtgagccgcctgcagcaggttacggtgctgggcgcgaccggctcggtcgggctcagtaccctggacgtcattgcgcgtcaccccgatcgctatcgggttttcgccctgaccggcttcacgcgtttgcgcgagctgctggccttgtgcgtgcgacactcgccgcgctttgccgtggtgccagaggcggctgcggctcgccgtctgcaggatgatctgcgcgctgccgggctggccactcaggtattggtcggcgaggcagggttgtgccaggtctcggccgatgctgacgtggataccgtggtggcggcgattgtcggtgcagcaggtttgcgcccgaccttggcggcggtcgatgctggcaagaaaatcctgctggccaataaagaagccttggtcatgtccggtgctctctttatgcaagcggtgcgcaagagcggcgcggtgttgctgcctctggacagcgagcacaacgccatcttccagtgcatgcccggtgattttgcccgcggcttgagtcaggtcggcgtgcgccggattctgctgacggcatctggcgggccattccgccagactccgtcggccgagcttgagcatgtgtcacccgagcaggcgtgtgctcacccgaactggtccatggggcgcaaaatctccgtggattcggcgagcatgatgaacaaaggcctggaattgatcgaggcatgctggttgttcgatgcgcggcctgaccaggttgaggtggtgattcacccacaaagtgtgatccattccctggtcgattacgtggatggttcggtgttggcgcagttgggtaatccggacatgcgcacaccgatcgccaatgccttggcctggccggagcgcattgattcgggcgtggcgccgttggacttgtttgcaatcgcgcgcctggacttcgaagccccggacgagcagcgtttcccgtgtttgcgcctggcgcggcaagcggccgaggcgggtaacagtgccccggccatgcttaacgcggccaatgaggtggccgtagccgcgtttcttgaacggcgcatccgctttccgcagatcgcgagtatcatcgaggacgtcctggcgcttgagccagtggtggcggtgaatgacctggaggcggtgtttgaagccgacaccaaggcccgagccctggctgggcaatggttggaacgcaatgcgcgttaaggtttgagtcttcaggcattggattgagatgcggagaaattagatgagtgcgctctacatgattgtcggcaccctggttgctctgggtgtgttggtgaccttccacgaattcggccacttctgggtcgcgcgtcgttgcggcgtcaaggtattgcgcttttccgtcggtttcggcatgccgttgttgcgctggcatgaccgccgcggcactgagtttgtgattgctgctatcccgttgggcggctacgtcaagatgctcgatgagcgcgaaggcgaagtgcctgcagaccagttggaccaatccttcaatcgcaagaccgttcgtcagcgtattgcgattgttgcggcggggccgattgccaactttctgttggcgatggtgttcttctgggtcttggccatgctgggcagccagcaggtgcgcccggtcattggcgcggtcgaagcggacagcatcgcggccaaggctggcctgacggctgggcaggaaattgtatccattgatggcgaacccaccacgggctggggcgcggtcaacttgcagttggtgcgtcgcctgggcgagagcggcaccgtcaatgtggtggtgcgcgaccaggattccagcgccgaaaccccgcgggcattggcgctggaccattggctcaagggcgctgatgagcccgatccgatcaagtccctggggatccgcccttggcgtccggccttgccgccggtgctggccgagctcgatccgaaaggcccggcccaggctgctggcctgaaaaccggtgatcgcttgctggccctcgatggccaggcgctgggtgactggcagcaggtggtcgacctggtgcgtgtacgccctgataccaaaattgtgctgaaagttgagcgcgagggtgctcaaatcgacgtccccgtgaccttgtcggtgcgaggcgaagccaaggcagccgggggctacctgggtgccggggtcaaaggtgtcgagtggccgccatcgatggtgcgagaggtcagctacgggcctttggccgcgattggcgagggtgcgaaacgcacctggaccatgagcgtgctgaccctcgaatccctcaagaaaatgttgttcggtgagctctcggtaaaaaacttgagtggaccgataaccattgctaaagtggcgggcgcttctgcccagtcgggtgtcgcggatttcctgaatttcctggcttatctgagtattagccttggggttctgaatttgctgcccattccagtattggatggggggcatctgctgttttatctggtcgagtgggtgcgtggtcgccccttgtcggatcgggtgcagggttgggggatacagatcggtatcagtttggtggtcggggtgatgttgttagccctggtcaacgatttgggacgtctgtaacgcttcgctgaattgcgaatctgccgcattttgcggcagtttgtttattgccagttggaataagaaaggacttcatgaaacgtctgctgctaactgcggttctcaccgtattgatgatcgccgaagttcacgccgagtccttcaccatctccgatattcgcgtcaacggcctccagcgggtttccgcgggtagcgtctttggtgccttgccgttgaacgtcggggaacaggcggatgatcgtcgcctggtggaatccactcgtgcgctgttcaaaaccgggttctttcaagatatccaactgggtcgcgaaggcaacgtcctggtcatcacggtcgtcgagcgaccttccgtcgcgagtatcgcgatcgaaggtaacaaggccatctccactgaagacctgatgaagggcctgaagcaatcgggcctggccgagggcgagatcttccagcgcgcgacccttgagggtgtgcgtaacgagctgcaacgccagtacgttgcccagggccgctactccgcgaccgtggaaaccgaagtgatcccccagcctcgtaaccgtgtgggcctgaaggtcaacatcaacgaaggcaccgtggccgccatccagcacatcaacgtcgtgggcaacaccaagttccctgatgaagacctggtcgacctgttcgaactcaagaccaccaactggttgtcgttcttcaagaacgatgacaagtacgcccgtgaaaaactctccggtgacctggaacgcctgcgctcctactacctggaccgtggctatatcaacatggacatcgcttcgacccaggtgtccatcaccccggacaagaagcacgtctacatcaccgtcaacgtcaacgaaggcgagaagtacaaggttcgtgacgtcaagctcagtggcgacctgaaagtgcctgaagaccaggtcaagtccctgttgctggtgcagaaggaccaggtgttctcgcgcaagctgatgaccaccacctccgaactgatcacccgtcgcctgggtaacgaaggctataccttcgccaacgtcaacggcgtgccgaccccgaatgatgaagaccacaccgtggacatcaccttcgtcgtcgatccgggcaagcgtgcctacgtcaaccgcatcaacttccgtggcaacaccaagtctgcggacgaagtgctgcgtcgtgaaatgcgtcagatggaaggtggctgggcttcgacctacctgatcgaccaatccaagacccgtcttgagcgcctgggcttcttcaaggaagtcaacgtcgaaaccccggccgtaccgggtgtggatgaccaggttgacgtgaactacgccgttgaagaacaagcctcgggctcgatcaccgccagcgtcggtttcgcccagagcgccggtttgatcctgggtggttccatcacgcagaacaacttcctgggtaccggtaaccgtgtgtccatcggcctgacccgcagcgaataccaaagccgatacaacttcggctacaccgacccctactggactgcagacggtgtgagcctgggctacaacgccttctaccgcaccactgactacaaagacctcgatgttgacgttgcaagctatgcgatcgacagcctgggtgccggtgtcaacgtgggttacccgatcagcgagacctcgcgcctgaccttcggcctcaccgcccagcaggatgagatcaagaccggtgtgtacaccgtggacgaaatcttcgacttcacccgtcgtgaaggcgacaagttcctgaacttcaaggcgtctgccggctggtccgagtcgaccctgaacaaaggtgtactggcaacccgcggccactcccagagcctgactgcggaagtcaccacgccgggcagcgacctgtcgttcttcaagctcgactaccgcggtcagttgttccagccgttgagcgataactacaccatgcgcctgcacacagagctgggctatggcgacggttatggttcgaccgatggcttgccgttctatgaaaactattatgcaggtggtttcaactcggtacgtggcttcaaggacagcaccttgggtccgcgtggtacgccgagccgtggtgttgatcgcactggtaaccagggcactgtcgctgactcggacaacgacccgctgccattcggtggtaacgtgctgatccagggtggtgcggagattctgttcccgctgccgttcgtcaaggaccagcgttccctgcgtacttcggtcttctgggacgtgggtaacgtgttcgactccaagtgcgaacagatcaagaacccaagtggcttgaagtccaatactcaatgcaacgacgtgagcctcagcaacctggcaagctccgtgggcgtgggtgtgacctgggtgactgcgctgggcccgttgagctttgctctggccatgccgatcaagaaaccggataacgctgaaacccagattttccaattctccctcggccagacgttctaagcgtctgacctaagataacgacaacggattctgtaggagtacatcgtgcgtaagttgactcaattggtcttgctggccactgtgctggtcaccaccccggccttcgccgaaatgaaaatcgccgttctgaactatcagatggccctgctggaatccgatgcggccaagcgatacgccgtggatgccgagaagaagttcggtccgcaactgaccaagctcaagacactggaaagcagcgccaaaggcatccaggaccgcctggtagccggtggcgacaagatgcagcaaggcgagcgcgagcgtctggagcttgaattcaagcaaaaggcccgtgactaccagttccaatccaaggagctgaacgaagccaaggctgtggccgaccgcgaaatgctcaagcagctcaagcctaaattggacagcgctgtggaagaagtcatcaagaagggtgcctttgacctggtgttcgagcgtggcgccgtgatcgacgtcaagcctcaatacgacatcacccgccaggtgatcgagcgcatgaaccagctgaagtaaaccatgacagcgactatcaaactcggcgagttggccgagttcctgggggccaccttgcgtggctccaaggagaaagaaatcactgggctagccaccttgcaggaggctggcccagctcagttgagcttcctcgcaaatcctcaataccgtaaatacctggtcgactgccaggccgcagccgtgttgctgaaggccgctgacgccgaagggtttatcggggatgcgctggtggtggccgacccgtacctgtcgtacgccaaggcgtcgcacctgttcgatcccaagccgaaggcggccggcggtattcacccgtctgccgtgatcgccgatgatgcccaggttgacccgacggccagcatcggcgcgtttgccgtgatcgagagtggagcgcgtattggtgcaggcgtcaccgtgggtgcccactgtttcatcggcgcgcgctgcgaaattggtgccgatggctggctggctcctcgcgtaaccctgtaccacgatgtgcgtatcggtcagcgtgtggtcatccagtcgggcgccgtgatcggcggtgagggcttcggctttgccaatgccaagggcatctggcacaagatcgcccaagtcggtggcgtattgatcggcgatgatgtggagatcggcgtgaacactgctgtggatcgcggggccctggccgataccgtgatcggtaacggtgtgaagctcgataaccagatccagatcgcccacaacgtgcagattggcgatcacaccgccatggccgcctgcgtggggatttccggcagcaccaagatcggcaagcattgcatgctcgccggtggcgtagggctggtggggcatatcgatatttgcgacaacgtcttcatcaccggcatgaccatggtgacccactcgatcacagagccaggggcctattcgtccggtaccgcgatgcaacctgcggccgaatggcgcaagagtgccgcgcgtttgaggaagatcgacgacatggcacgacgtatcaaacagcttgaaaagcgtgtcggggacgtgacccccggcggtaatgcttcatcagaaggctgataccatttccatatcaagtgtgcgcagccgctagacggcctccttgatttgctagcggggcgtgcgcctggtgcgcccgcccccaatctttattacaggcttccccccgaaatgatggacatcaacgagattcgcgaatacctgcctcaccgttacccgttcctgctggtggaccgcgtagtggacctcaacgtcgaggaaaagcgcattcgtgcctacaagaatgtcagcatcaacgaaccattcttcaacggtcactttcctgcgcatccaatcatgccgggtgtgttgatcatcgaagccatggcccaggctgccggtatccttggtttcaaaatgctcgacctcaagcctgccgacggcacgctttactatttcgtgggttccgacaagctgcgttttcgcaacccggtcaccccgggtgaccagttgatcctggaagccaagttcatcagttgcaagcgccagatctggaagttcgaatgccaggcctcggtagatggcaagccggtgtgctctgccgagatcatctgtgcggaacgcaaactatgagtttgattgaccctcgcgcaatcatcgatccgtcggccgtactggccgccgacgttgaggtcggcccttggtcgatcgtcggcgcaggtgtggaaatcggcgaggggactgtcatcgggccacacgtgatccttaaaggtccgacccgtattggcaaacacaatcgtatctaccagttctcctcggtaggcgaagacaccccggacatgaagtacaagggtgaagaaacacgcctggtcatcggtgaccacaacatcattcgtgaaggcgtcaccattcaccgcggcaccgtgcaggatcgcgctgaaaccaccttgggtgatcacaacctagtcatggcctatgcgcacatcggccatgacagtgtgatcggcaaccattgcatcctggtcaacaacactgcgttggcaggccatgtgcacgttgatgactgggcgatcctctccggttttaccctggtgcatcagtattgccatatcggcgcccacagcttttccggcatgggcaccgccatcggcaaggatgtcccggcgttcgtgacggtattcggcaaccctgccgaagcccgtagcatgaattttgaaggcatgcgtcgtcgcggtttcagtgaagaggccatccacgccttgcgccgtgcctacaagacggtttaccgccaagggttgaccgtcgaacaggccctgaccgaactggccgagccggctacgcagttcccggaagtcgcggtgttccgtgactctatccaaacctcgactcgcggcatcacccgctgatcatggccactttgcgtattgcgctcgtggccggtgaagcttccggcgatatcctgggtgctggcttgatgcgggcgctcaaggcccagcatccggcggtggaatttatcggcgtcggtggcccgttgatgcaggccgaaggcctgacctcctacttccccatggagcgcctgtcagtcatggggctggtggaagtcttggggcgcctgcgtgagctgctggctcgccgcaagctgctgatcaagacgctgatcgaagaaaagcctgacgtctttatcggcatcgatgcgccggatttcacgctcaatatcgaactcaagttgcgccaggccgggatcaagaccgtgcactacgtcagcccatccgtgtgggcgtggcgccagaagcgcgtgttgaaaatccgcgaaggctgcgacctgatgttgaccttgctgccattcgaagcccggttctacgaagagaagggcgtgccggtgcgctttgtcggccacaccctggctgacgccattcccttgcaagctgatcgtacggctgcacgtgccgagctgggcttgcccgatggccccttggttgcgttgatgccagggagccgtggcggcgaggtaggacgtttgggagcgctgttttttgatgccgccgaacgtctccaggcgcaaaagccgggaatccgctttgtgctgccttgcgccagcccacaacgccgtgcgcagatcgaaacgctgctggaaggtcgcaacctgccgttgaccctgctcgatggccagtcccacctggccctggcagcctgcgatgcggtgttgatcgcctcgggcaccgccacgcttgaggccttgctgtacaagcgcccgatggtcgtcgcctatcgcctggcgccactgaccttctggatcctcaagcgcatggtcaagagcccttacatttccttgcccaacctgctggcccagcgcctgctggtgccggagttgttgcaggacgatgcaacgcccgaagcgcttgcaaaaaccctactacccttgattgacggcggcgaagagcagacccgtggtttcgacgacatccaccgcacgttgcgccgtgatgcctcgaaccaggcggccgatgccgtgctgaccttgatcggccataaacaggaagccttatgaccacgcaaatgggcctggatttcagcctcgtcgcccaagcccacgagttggtggcaggtgttgacgaagtagggcgcggcccgttgtgtggcgcagtggtcacggcggcggtgatccttgatccgaaccgcccgatcctggggctcaacgattcgaagaagctcaccgaagcccgtcgtgaaaagctctatgacgagatctgtgaaaaagccctgagctggcatatcgcccgggctgaagtcgaagagatcgacgagctgaatatcctgcacgccaccatgctggcgatgcagcgcgctgtggaagggctgcacatcaccccgaaaatggcgatgatcgacggcaaccgctgccccaagctgacgatgccgtccgaagcggtggtcaagggcgatagcaaggttcccgccattgccgctgcctcgatcctggccaaggtcagccgtgaccgtgagatggccgcgttcgaattgatctaccccggctacggcattggtggccataaaggctacccgacgcccgttcatctggaagccctggctcggctcggccccaccccgatccatcgccgctcgtttgccccggtacgccaggcttatgaggcccgtgaaagtctgatcgaggtttagcagcaaggctgatgtttttacccaggcccggtacaatccgggccttgttgttttcatgtatcaagacaggatcactatgccggcttcattcgttcatctgcgcctgcacactgagtactccctggtcgacggcctggtacggatcaaaccgctggtcaaaaccctggtgggcatgaacatgcctgcggtcgcggttaccgaccagaacaacatgtgttccctggtcaagttctacaagaacgccatgggcgccggcatcaagccgatctgcggcgccgatctgtggctgtccaacaaagacccggataaccccctgagccgcatcagcctgctggcgatgaacggcgtgggttaccgcaacctcaccgaactgatttcccgtggctttatcgatggccagcgcaacggctcgatcatcatcgagcgcgagtgggtggccgaagccagcgaaggcctgatcatgctctcggcggccaaagagggtgaaatcggtatcgcgctgctgggcggcaacccccaggaagccgaggtgctggcgcgcgagtggatgcaggtattcccgggccgtttctacctggaagtgcagcgcaccaatcgccccaacgatgaagagcatttgcacgccgctgtagccctggccgataagctgggtgcgccgctggtggcgaccaacgatgtgcgctttatcaagaaagaagatttcgaagcccacgaaacccgcgtgtgcatcggcgagggccgggccctggatgacccgcgccgctcgaagaactacagcgaagagcaatacctcaaaagcgccgatgaaatggcggagttgttcagcgatttgcccgaggcccttgagaactccgtcgagatcgccaagcgctgcaacattgaagtaaagctgggcaagcacttcctgcccaacttcccgattcccgatggcatgaccatcgacgaatactttcgcaaagtgtcgttcgatggcctggaagaacgcctcagcgtcctgctgcccaaggacaccaccgaagactacgaagccaagcgccaggtgtatgtcgaccggttgaatttcgagctggatatcatcatccagatgggatttcctggttacttcctgatcgtgatggactttatccagtgggccaaaaacaacggcgtaccggtaggtccgggccgggggtcaggtgctggctcgctggtggcctatgtacagaagatcaccgaccttgacccgctggaatatgacctgctgttcgaacggttcctgaacccggaacgggtttccatgcccgacttcgacgtcgacttctgcatggatggccgtgaccgcgtgattgaatacgtggccgaaaaatatggccgcaacgcggtaagccagatcatcaccttcggttccatggccgccaaagcggtaatccgcgacgtagcgcgggtgcagggcaagtcctacggtttggccgaccgcctgtcgaagatgatcccgttcgaagtcggcatgaccctggaaaaagcctacgagcaggaagaaatcctgcgcgactttatcaaggtcgatgaagaagccgctgaaatctgggacatggcgcgtaagctcgaaggtgtggtgcgtaacgtcggtaaacacgcgggcggtgtggttatcgcgccgaccaagctcaccgacttttcgccgatctattgcgatgaagaaggcgacggcctggtcacccagttcgacaaggacgacgtggaggcggccggcctggtgaagttcgacttcctcggcctgcgcaccctgacgatcatcgactgggcgctcaagaccatcaaccgcgaccgtgccaagatcggcgaagaaccgctggatatcgcgtttatcccgctggacgacaaaccgacctacagcctgctgcaaaaagccgaaaccaccgcggtgttccagcttgaatcccggggcatgaaagagctgatcaaaaagctcaagcccgactgcctggaagacttgatcgcactggtggccctgttccgtccgggcccgctgcaatcgggcatggtggatgacttcatcaaccgtaaacacggccgggccgagctggcttacccgcactccgactaccagtacgagggcctcaagcccgtactggcgccgacctacggcatcatcctgtaccaggaacaggtgatgcagatcgcccaggtgatggccggctacaccctcggcggtgcggacatgctgcgccgcgccatgggtaagaaaaagcccgaggaaatggccaagcagcgcggcggtttcattgaaggctgcgcgactaacaacatcgatgccgacctggccggtaacatcttcgacctggtagaaaaattcgccggttatggcttcaacaaatcccactccgccgcctacggcctggtgtcgtaccagaccgcctggctgaaagcccattacccggcgccgttcatggcggcggtactctcggcggatatgcacaacaccgacaaggtcgtgaccttgatcgaggaagtgcgcaccatgaagctgcgcctcgatgcgccggacgtgaacgcttcggagttcaagttcacggtgaacgacgaaggccgcatcatctatggcctcggcgcgatcaagggcgtgggcgaaggcccggtggaggccattaccgaggcgcgtcaggacgggccgttcaaagacctgttcgatttctgtgcgcgggtggacctcaagcgcatcaacaagcgtaccctcgatggcctgatccgcagcggcgcactcgaccgtcttggcccgtacttccatgatgagccgaaggcttaccaggccaatatcgaccgcaaccgtgcggtgctgctgaccgccatggaagaggcgatcaaggctgccgaacagactgcccgtacccatgacagcggccacgccgacctgtttggcgggctgttcgtcgaagaagatgccgatgtctacgccaaccatcgcaaggccaaggagctgacgctcaaggaacgcctgaaaggtgagaaagacaccttgggcctgtaccttaccggtcacccgattgacgagtacgaaggcgaaatccgccgtttcgcccgtcagcgcatcatcgacctgaaaccggcgcgggatacccagaccgtcgccggcatgatcatcgccctgcgggtgatgaaaaataagaagggcgacaagatgggcttcatcacccttgatgatcgctcgggccgcatcgaagcgtcattgtttgccgacgcgttccactccgcccagtcactgctgcagaccgacgccatggtggtggtggaaggggaggtcagcaatgacgacttctccggtggcctgcgcctgcgtatcaagcgggtgatgagcatggaagatgcccgtaccaacctggccgagagcctgcgcctgaaggtcaagaccgaagcgcttaaaggcgatcagctacgctggttgggggacttgctcaaacgccaccgtggcgcatgcccggtgaccatggaatacacgggcagcgatgccaaggccatgttgcagtttggcgagacgtggcgaattgatcccgctgatggcttgattcaagctttgcgtgaccagttcgggcgagacaacgtcttcctccaataccgttgacggtcagatgagtctgatctcgactaaacatttaatctcgacctaaacgcgcctctcccttaaggtagggcgcgaatagacaaccggctggccaggcaccccttggccgtcgacccaagacggacgcttatgaacccgaattttcttgatttcgaacagccgatcgctgacctgcaagccaagatcgaagagctgcgcctggtcggcaatgacaattcgctgaatatcggcgatgagatcgctcgcctgcaagacaagagcagcacgctcaccgaagacatcttcggcaagctgaccagctggcagatcgcgcgcctggctcgccaccctcgccgtccttacaccctggactacatcgagcacatcttcaccgagttcgatgagttgcacggcgaccgtcacttctccgacgacgcggctattgtgggcggcatcgctcgcctggacgaccagccggtgatggtgatcggtcaccagaaaggccgtgaagtgcgcgagaaagtacgccgcaacttcggcatgccgcgcccggaaggctaccgcaaggcgtgccgcctgatggaaatggccgagcgcttcaagatgccgatcctgaccttcatcgacacgccaggtgcctacccgggtatcgacgccgaagagcgcaaccagagcgaagcgattgcctggaacctgcgcgtcatggcccgcctgaaaaccccgatcatcgccaccgtgatcggtgaaggtggttctggcggtgcgctggccattggtgtctgcgaccaactgaacatgttgcagtactcgacctacgcagtgatctcgccggaaggttgtgcctcgatcctgtggaaaaccgccgaaaaggcgccggacgctgccgaagccatgggcatcaccgccgatcgcctcaaaggcctgggtatcgtcgacaaggttatcgccgagccactgggcggcgcccaccgtgacccggctgccgccgctgcgaccatccgtgccgagttgggttcgcaactggcgatgctcaagaagctggataacgaagcgctgctggctcgtcgttatgagcgcctgatgagctacggcctctaagccgacgctgtacccaatgtgggagccggcttgtgtgggagctggcttgcctgcgatagcatcaccttggtatcactgatacaccgaggtgcctgcatcgcgggcaagcccggctcccacatttgctttgtgtatgctgacgaacgtattcaagctttgcggcggtgacgtgtgatgaaaccaaccctgccggccacactcctgcacaccctggccccctggcgcaacgcgccggcctggcatatcgcgttctccggtggtctcgactccaccgtcctgctgcacctcctggcctcactggccaaaatcgaaaacctgcctcctgtcagcgccgttcatgtccaccatggtctgcaagctgctgccgatgcatggcctgctcattgccaatcggtctgcgacgccctgggcgtacctttgcgcgtcatgcgcgtgcaggtcagtcccggtgcgagccttgaacgcgcggcccgcgaggcgcgctaccaagcgttcatgcaagtcatggaggcaggggaggtgcttttcactggccagcatcgcgacgatcaagccgaaaccctgctgtttcgcctgctgcgtggcgccggcgtgcgagggttggcgtctatgcctgagcatcgccccttagcgcagggccacttggtgcggccgttgctggcattctctcgtagcgagctggaagcctacgcccatcagcatcagttgcagtggatcgaagatccctccaacgctgatccacggttttcccgcaattacctgcgtcaccgcgtattcccaaccctgacggaacgctggccccaggcgatcacccacctggctcgcacggctgaacacatggctgaggcgcaagggctgctcgacgagttggcgctgatggacctgcagcgcgccgatcagccttctacgtttccctggttaccgctgccgtctctggcgcttgagccattgcgtgaactatccgatgcccgccagcgtaacgccctgcggcattggctgataccactgaccggtttaccggacagcgaccactgggctggttggcatgccctgcgcgatgccaagggggacgcacagcctctgtggcgcctggccgacggccaaatgcagcgtagcggtgaacgcatctggtggttaccttcaacttggtcggagttttccgacgcatcggtgagctggcccgatccgcaaaatccactagagttaacgggcaatggccaactgaagtttattggcgaggctcccgaaggcccgctagtgatccgatatcgccagggtggcgaaatcatcgacgtaccgggccgaggccggcgtgatctcaagcgtctgctgaatgaaagcggcatgccgggcttcgtccgtggcagattgccgctggtctatcggggcgagcaattgctggctgtgccaagcgttgcgggggcatgggcccggtcggtgggtgaggtgcaattggattggttgccacagagctgcgatcaaggtttgagctgatagcgcctttccggtagactacgctcccttcttgatacaacttctgtggattcgcctgaatcgcagtcgttgccgattaccaagcagtctttgctgggcgattccaaaaaatgtgtagcgatcaacgtaccggtgtttcattgctggtctgtcacaacgcggcggtttttttgaaaggtgcactgtgattaatgcaggtgatcgggggcttcggccttccttcgctttccccggcggctcggaccgctttaacgcagacttctagggtttttcatgacgcgctacatattcgtcacgggcggtgttgtttcttcattggggaaaggcattgcctccgcttcattggcggccatcctggaggcgcggggacttaaggtcaccatgctcaagctggacccgtacatcaacgttgacccgggcaccatgagcccgttccagcacggtgaagtgttcgtcacccacgacggcgccgagaccgacctggacctgggccactacgagcggttcatccgcacgaccatgacccagaacaacaacttcaccaccggccgtgtctacgagcacgtgctgcgcaaagagcgccgtggtgattacctgggtgcaaccatccaggtgatcccgcacatcaccgacgaaatcaagcgccgcatcatcaagggtgcaggcgatgccgacgtggcgatggtcgagatcggtggcaccgtgggtgacatcgagtcccaaccgttcctcgaagccatccgccagttgcgtttcgaagttggcgccaagcgcgcgatgctgatgcacctgacactggtgccctacatcgccactgccggcgaaaccaaaaccaagcctacccagcactcggtcaaggaactgcgttccatcggcctgcagccggatgtgctggtatgccgctccgatcacccgatcgacatttcctcgcgccgcaagatcgcgcagttcaccaacgttgaagaacgtgcggtaattgccctggaagacgccgataccatctacaagatcccgggcatcctgcattcgcaggggctggatgattttgtggtcgagcgtttcggcctgcagtgcggcggtgccgacctgtccgagtgggaagcggttgtcgacgccaagctcaaccctgagcatgaagtcaccatcgccatggtcggtaagtacatggagctgctggacgcgtacaagtcgctgatcgaagccatgagccacgccggtatcagcaaccgtaccaaggtcaacctgcgctacatcgactccgaagacatcgagaaccagggcactgcgctgctcgaaggtgttgacgcgatcctcgttcccggcggtttcggcctgcgtggcgtggaaggcaagatcactgccgtgcagtacgcccgtgaaaacaaggtgccgtacctgggtatctgcctgggcatgcaagtggccgttatcgagttcgcccgtaacgtgctgggctggaaagacgccaactccaccgagttcgatcactccagcggccacccggtcgtgggcctgatcaccgagtgggaagacgccaccggcgccgttgaaacccgtaccgaaacgtccgacctgggcggcaccatgcgcctgggtgctcaggattgcctgctggaggccggctcgctggtacacgactgctatggcaaggacgtgatcgtcgagcgtcaccgtcaccgctacgaagtgaacaacaacctgctgccgcagatcaaagaagctggcctgaaaatctccggtcgctccggtgatggcaagctggttgaggtggtcgaggcaccggatcatccgtggttcgtggcctgccagttccacccggagttcacctcgacgccgcgcgacggtcacccgttgttcagtggtttcgtcaaagcagcactgacgcaacaccagaagaaggcgtaaaccagatggcccagaagatcattcgcgtaggcgacatcgagattgccaacgacaagcccatggtgctgttcggcggcatgaacgtgctggaaagccgcgacatggcgatgcaggtgtgtgaggagtacgttcgggtcacccagaaactgggtatcccttacgtcttcaaggccagcttcgacaaggccaaccgttcgtccgtcacctcctatcgcggcccgggccttgaagaaggcatgcggatcttccaggacatcaagcaagccttcggcgtgccgatcatcaccgacgtccacgagcctgagcaggctgccgtggtcgccgaggtgtgcgacatcatccagttgccggcctttttgtcgcgccagaccgacctcgtggtcgccatggccaagaccggcgctgtgatcaatatcaagaaagcccagttccttgcgccccaggagatgaaacacatcctgagcaagtgcgtggaagcgggtaacgaccagttgatcctctgcgagcggggttcaagcttcggctacaacaacctcgtggtggacatgctcggtttcggcatcatgaaacagttcgaataccccgtgttcttcgacgtcacccacgcgctgcaaatgcccggtggtcgttcggactccgctggcgggcgccgtgcccaggtgacggacctggccaaggcgggcatgagccagtcgctggcgggcctgttccttgaagctcacccagatccggacaacgccaaatgtgatggcccatgcgccctgcgcctggacaagctggagccattcttggcccagctcaagcagttggacgagctggtcaagagttttccgacggtagagaccgcgtaactggcatttctccggtagaatttcccacgctttacgctcaggcccccgggcctgagccttgtcgtctgcaagcctgccccgttgttccacccttgcggtcggtcaaaagatttccttcagctgcgtcgttttcgtcaactttggagtgtttacaacaatggcaaaaatcgtcgacatcaaaggtcgtgaagttctcgactcccgtggcaaccccaccgtcgaagccgacgtgcttctcgataacggcatcatcggcagcgcctgcgcgccgtccggtgcttccaccggttcgcgcgaagcgctggaactgcgtgatggcgacaagagccgttacctgggcaagggtgtactcaaggctgtagccaacatcaacggtccgattcgtgacctgttgctgggaaaggacccgctggaccagaaagccctggaccacgcgatgatcaagctcgacggcactgaaaacaaaggcagcctcggcgccaacgccatcctcgccgtgtccctggcggctgccaaggcggctgcgcaggaccaggacctgccgttgtacgcgcacatcgccaacctgaacggcaccccgggcgtctactcgatgccggtaccgatgatgaacatcatcaacggtggcgagcacgcggataacaacgtcgacatccaggagttcatggtgcagccggttggcgccaagtccttctctgaaggcctgcgcatgggcaccgagattttccatcacctcaaggctgtactgaaggcccgtggcctgagcactgccgtgggtgacgaaggtggtttcgcgccgaacctggcctccaacgaagatgcactgaaagtcatctccgaagccgtggccaacgcgggctacaagctgggcaccgacgtgaccctggccctggactgcgctgccagcgaattctatgaagacggcaagtacaacctgtccggcgaaggccaggtgttcaactccgaaggttttgctgaatacctcaagggcctgacccagcgctatccgatcatctcgatcgaagacggcctggacgagtccgactgggatggttggaaaattctcaccgacaagatcggcgagaaaatccagctggtgggcgacgacttgttcgtgaccaacaccaagatcttgaaagaaggcatcgacaagaagatcgccaactcgatcctgatcaagttcaaccagatcggcaccctgaccgaaaccctggaagccatccagatggctaaggctgcgggctacaccgccgtgatctcccatcgctccggcgaaaccgaagattccaccattgccgacctggccgtgggtacttcggcgggccagatcaagaccggttccctgtgccgttccgatcgcgtgtccaagtacaaccaattgctgcgcatcgaagagcaattggcaggtaaagccaagtacaacggtcgcggcgagtttcgcggctaagcagtaaatggtaaaaagtcggcggattgcgtcagaaatctcacgaaaatgtgaatttcggcgctaatctgctgactgacaagcgcaagcctggttttaccaggctttgtgctatcagttgctgcaaaaggtttgcatgactgtcttttttcactggatacccggatttcgatgcgcagtcccaattggttgttcctcgtcttgctcttgttgctggctggcctgcagtaccgcctatgggtcggtaatggcagctttgcgcaggtggaagagttgacccagcaaattgccgaccagcgtgccgaaaacgaacgcctgctggagcgcaaccgtgtcctcgacgctgaagtgcttgagctgaaaaaaggcacggagaccgttgaagagcgggctcgccatgaactgggcatggtcaaggagggcgagaccctctaccagttggcccaatgagccacgatttaccggccttctgggccgtgattcctgccgcgggcgtcggtgcccgtatggctgcggaccgtcccaagcaatacctgcaactgggcgggcgcactattcttgaacacagcctcggctgttttctcgaccatccatgcctcaagggcctggtggtcagtcttgcaattgacgatccttattggcccagcttggcatgcgccaatgaccggcgtatccagcgtgccgacggcggctcggaacgttccggctcggttctcaatgcgctgctgcaactcaatgccctgggcgccagtgatgaagactgggtgttggtgcatgacgctgcgcggcctaatttgagccgtgatgacctcgacaagctcctggcggaactggccgatgatccggtaggcggcctgctggcagtgcccgcgcgcgataccctcaagcgtgttgacaggcatggccgtgtggtggacaccattgatcgcagcctgatctggcaggcctacacaccacagatgttccgactgggcgccttgcatcgcgccttggcggacagcttggtggccgatgcgctgatcaccgatgaagcctcggccatggagtggtccgggcaggcgccgcgtctggttgaagggcgttcggacaatatcaaggtgactcggccggaagatctggagtggttgaagttgcgctgggctaaccggcggtaaccgcttcatcgcaggcaagccagctcccacatttggatcgcggtgcgtcagctagatcagcttcggctgtcaggccgtcacgggagcaagctccctcgccacaggtccagcgtcgcctcgaagttgtgtagatacctatgccgcgatgaggccggtgcagaccacctcaattcaatgcttgtactccggcctctcagccagccccaccttcaagaaatccaccagcttcctcaccttcggcgacaaatgccgctgctgcggatacagcgcccacaccgcagtattcggcggttgatgagcctccagcaacgacaccaacgccccactgtgcagatgctccaggacgtagtaatccggcaactggcacaagcccatgccttgcaacgccgcatccagcactgcttgcccactgttgcagcgccaattgccttgcacgcgctgggaaaattcccgcccgtcttgggccatttgccagatatccgaactgccaatcaggcagttatgccggctcaactccgacaagctgtgtggccgaccgtaccgtttgaggtaggagggcgacgcacacaggtacatgcgtcgaggtgccaggcggctggcaaccatgcgtgagtcttgcaaacgtcccaggcggatggccaggtcgaggccttcgtggaccaggtccagtgagcgattggtcaactcgatgtccacgcgcagttgcggatagtgcgccataaagcgtgtcaccagcggcacgataaaacgctcgccataagccacggcgcaggtcatgcgcaacatgcccttgggttcgctggtcaggtcgcccaccgcccgcagcgcttcctcgcgaccgtcctgcagacgttggcagtgttgcaggaaggtctggccggcttcggtcagcgtcaccttgcgtgtgctgcggtacagcaatcgggtttgcaggcgttcttccagacgcgccacttgccggctgacgtgggaggacgatacccccagtcgctcggccgccgccgtgaactggctgcattcggccaccgcgacaaactcgtcaatgccttcccagcggttctccagcatgctgattgtccctatatggcaataatgttttgcttttgcctggattattcatcaatgggcgatgttttacactcacggcctcagtttttaacccgatggagaaacccggatgatcaagtcccgcgccgccgtagccttcgaagccaagaagccccttgagattgttgaagtggatgtcgccatgcccaaggctggcgaggtgctgctgcgggtggtcgcgtccggcgtgtgccacaccgacgcctacaccttgtcgggtgcagacccggaaggcattttcccgtcgatcctgggccatgaaggcggcgcagtggtggaagccatcggcgagggcgtgacctcggtcgctgtgggcgatcacgtgatcccgctgtacaccccggaatgcggcaagtgcaagttctgcctgagtggcaagaccaacctgtgccaggccattcgcgcgactcagggcaagggcttgatgccggatggcaccacgcgtttctcctacaagggccagccgattttccactacatgggcacctcgacgttctccgagtacaccgtgctgccggaaatctccgtggccaagattcctaaagaagcgccgctggaaaaagtctgcctgctcggttgcggtgtcaccaccggcatcggtgcggtgatcaacaccgccaaggtcaagccgggcgataccgtggccgtcttcggcctgggcggcattgggctgtcggcgattatcggcgcggtcaaggccaaggccggtcgcatcatcgccattgatatcaacccggccaagttcgaaatcgccaagcaactgggcgccactgattgcatcaacccgaaagactacgatcgcccgatccaggacgtgattgtcgacctgactgatggcggcgtggacttttccttcgagtgcattggcaatgtgcaactgatgcgtgcggctcttgagtgctgccacaaaggctggggcgaatcggtgatcatcggtgtggccggtgctggccaggagatcgctacacgtccgttccaacttgtcaccgggcgcgtctggcgtggttcagcgtttggtggcgtgcgcggtcgtaccgaattgccaagctacgtggaaatggcccagaccggcgaaattccgctggataccttcatcacccacaccatgggcctggaagatatcaacaaagcgtttgacctgatgcatgaaggcaagagcattcgtaccgtcattcacttctgaggtcggccatgagtctggaaaacctgtcatgccagaagagcttcggcggctggcataaacgttacaagcatcattccgatgtgctgggttgcgacatgacctttgccgtctacctgccgccgcaagcagagcagggcggcaagctgccggtgctgtattggctgtccgggttgacctgtactgacgaaaacttcatgcagaaggccggcgcccagcgcatggccgccgaactgggcttgatcatcgtcgcgccggacaccagcccccgcggcctcggcgtgccgggcgacccggacaatgcctgggacttcggcctcggcgcgggcttctacctcaatgccacccaggaaccctgggccaagcactatcggatgcatgactacgtggtgcaggaattgccggcattggtagaggcgcatttccctgcctccgataagcgcggtatcagcggccactccatgggcggtcacggtgcgctggtctgcgcattgcgcaaccctggacgttacctgtcggtgtcggcgttttcgccgatcaacaacccgatggactgcccgtggggccagaaagccttttcccgttatttgggggaagagcgttcgaaatggcgcgaatgggatgcctgcgtgctcatcagcgaagcctcggaaaagttgccgctcttggtggaccaaggcgatcgcgacgatttcctcgcggttcagctcaagcccgaagccttgcagcaagcggccaaagcagccaaccatccgctggaactgcgcctgcagcctggctacgaccacagctacttcttcatcgccagcttcatcgaagaccatttgcgccatcatggtcgtgctttgctcggttaatccgaggcaaaagtaggtagaatcacgccctgaattaaatcggggcgtttttttatgcgtattggccacggctacgatgtgcaccgtttcgctgaaggcgatttcatcaccctgggcggtgtgcgcattgcacaccaccatgggttgctggctcattccgacggcgacgtggtcttgcacgccttgagcgatgctttgctcggcgcggcggcattgggcgatatcggcaagcactttccggacaccgatcccaccttcaagggcgcggacagtcgtgtgttgctgcgccatgtggtcggcctgatccacgccaagggctggaaggtcggcaacgtcgataacaccatcgtcgcccaggcgccaaaaatggccccccatatcgaagcgatgcgcacagcgatcgccgcagacctgcaaattgaattggatcaagtcaacgtgaaagccaccaccaccgaaaagctcgggtttaccggtcgtgaagagggcatcgcagtgcactccgtcgccttgttgctgcgcgcatgaacgacctgcaactgctgggcccgcgggcctatggcgaggccctgggcagcgcggtactgaaggccacggccgaagacttccaggttgatgaggtgctggacatcccgctgaccggcgacggcgagcacctgtggctgtgggtggaaaaacgcggcttgaacaccgaggaggccgcacggcgtatcgccaaggctgctggcgtaccgttgcgcaccgtcagctatgccgggctcaaggaccgtcaagccctgacccgtcagtggttcagcgtgcaattgcccggcaaggccgacccggacatgagcggcgcagaaaacgacaccctcaagatcctgaaaactgcgcgtcacaaacgcaagttgcagcgcggtgcccattcggccaacggcttcaccttgcgcctgacccaactggccggcgacaccgctgccatcgacgcacgtctgcagttgattgcgcggcacggcatccccaattacttcggcacccagcgttttggccacaacggcggcaacgtggtggatgctcgcgagtgggctgcccgcaaggccctgcccgagcagcgcaacgtgcgctcgcgcttgctgtccacggctcgcagttacctgttcaacaaagtgttggcggcccgcgtcgccgacggttcatggcagcgagcccaagtcggcgatctgctggcgtttaccgacagtcgcagtttttttccggccggggaagctgagtgcagtgacccgcgcctggcgatcctggacctgcatcccaccggcccgcagtggggcgaaggtgattcgccggcgaaaggtcttacgtacgagctggaacaatctgtcgtcgctggcgaagcagacctacgtgattggctggtgaaggcgggaatgagccaggaacgtcgcattctgcgactgcccattggcgggttgacgtggcattatcccgggcctgacattctgcaattggaattcgtcctgccggccggatgcttcgccactgtcttggtgcgcgagcttgttgatctggtgccggtggggcagacggacagcccatgcgtattctgatatcaaacgatgacggtgccaccgcacccggtcttgccgcgctccatgctgcgctgcaggattacgccgagtgcgtggtggttgcccccgaccaggacaagagcggcgccagcagttcgctgacgctcgaccgtccgctgcacccgcgggtcctggccaatggctttatcagcgtcaacggaacccccaccgactgcgtgcacctggcaatcaacagtttgctggagcaccagccagacctggtggtctcggggatcaacctgggcgccaacctgggcgatgacgtgctgtattccggcaccgtggcggcggccctcgaagggcgcttcctgggccgaaccggctttgccttttcctttgcttcgcggcaactggataacctggcgacggcggcctactacgcgcgcaagttggtggaggcccatgcttccctggacctgccgccgcgtacggtactcaacgtcaatatccccaacctgcccctcgaccatattcgcggcatccaactcacgcgcctgggccatcgcgcccgtgcggcggcgcccttgaagctggtcgacccacgcggcaaggaaggctattggatcgccgcggccggcgacgccgaagatggcggcgagggcacggactttcatgcggtgatgcaaggctatgtctccgttaccccgttgctgtttgatcgcaccttcagtgatgccttcagtggccttgatggctggctggagggactgcgttgatggctcgtgaacaagacgacctgttgcgccgtggcatcgggatgacctcccagcgcacccgggagcggttgatccagcgcctgtatgaagaaggcttgtccaacgcgcaggtgctggaagtgatccggcgcacgccgcggcacctgtttgtcgatgaagccctggcgcatcgtgcctatgaagacacggcgttgcccatcggtcacaaccagaccatctctcagccttacatggtcgcgcgcatgagcgagctgctgctggcggcggggcctttggacaaggtgctggagattggcaccggctccggctaccagacggccgtgctgtcgcaattggtagagcgggtgttttcggtcgagcgcatcaaggtgctgcaggaccgggccaaagagcgtctggtggagctgaacctgcgcaacgtggtatttcgctggggcgatggctgggagggctggccggcgctggcgccctacaacggtatcatcgtcaccgccgtggccaccgatgtgccgcaagccttgctggatcaattggcacctggcgggcggctggtcatcccggtgggctccggcgaagtgcaacagttgatgcttattatccgtgaggacgaaggcttttcccggcatgtactcggtgccgtgcgtttcgtacccttgctcaacggcccgctggcctgatcatttattcgcgcgcagtgaattctgtaagcggggatgtgtcttacggcggggtctattgaatcaacatgcctggcagccacgattaaacatgatgaatttttcctttcagtcatgtgccagtaaaaagccaatgcccagttatacttgcgtcatatttcaagcctgatccaggcgttaacgttcagccaccacaaagggagcggcgggtgagtctcacaggtcctgcgcagcgaatgagtaaaacaagctttcagcgactggtgcttggccttgtcttgagttccttattggcagcctgctcgagcacgccatccggcggtgcgcgggtcgttgaccgtaccaacgcaaccccccaaaggcccacggtgaccaccggtcaatacgtggtgcgcaaaggcgacaccctgttttcgattgcctttcgttatggctgggactacaaggcgctggccgcccgtaacaacattcctgtgccgtatacgatccatccagggcagaccattcgtttcgatggtcgctcaggttctgcacctacggcagttgtgacaaagtcgggttcttcgccatcgtcctcgagcaagaccaccatcatcactcggcctgcaggcagcgccacgcctacggttgcgagcaagccggcacccgcgccgttgccacctgccgggcctgcgccgaccggttggggatggccctcaaacggagtgttgattggaaaattctcttcaaacggtagtttgaataaaggcattgatatcgccggggatttgggacagcctgttttagctgcgtctgatgggacagtggtgtacgccgggagtggtttgcggggctacggcgagctggtcatcatcaaacacagcgatacctacgtcagtgcctacggtcataaccgcaggttgttggttcgggaggggcagcaggtcaaggtcggacagacgattgccgaaatggggtcaacgggcacagaccgggtgaaactgcactttgagattcgccgccaagggaagcctgtagatccgctgcaattcctgccccgtcgttgatgtgttgcacagcctgttccctcacgtagaaggaacaggctccagcgttgccaaggatagaggcgtcgcttgagcttgaggtcgaactcaccaaaggactataacaatggctctcagtaaagaagtgccggagtttgacatcgacgatgaggttctccttatggaggccggtatcgatttggaaacgatgtcagataatgaaggggtatcaccaccttcagttcgcaccaaatccaagaatgctgccgcattgaagcagcacaagtacgttgactacacgcgggcgctcgacgcgacccagctgtacctcaatgaaatcggcttttcccctctattgacccccgaagaagaagtccattttgcgcgtctgtcgcagaagggcgatccggctgggcgtaagcgcatgattgaaagcaacctgcgcctggtggtgaaaatcgcccgacgctatgtcaatcgtgggctgtccctgctggacctgatcgaggagggcaacctgggcttgatccgggctgtggagaagttcgaccctgagcggggcttccgtttctctacctatgccacctggtggattcgccagaccatcgaacgggcgatcatgaatcagacccgcacgatccggttgccgatccatgtggtcaaggagctcaacgtctacctgcgggcagcgcgtgagctgacgcaaaaactcgatcatgaaccttcgcctgaagagatcgccaacctgctggaaaaaccggtaggggaggtcaagcgcatgctaggccttaacgagcgtgtgtcttcggtggatgtctcgctggggccggattcggataaaaccctgctggacaccctgaccgatgaccgtccgacggatccttgcgagctgttgcaggacgatgatctttcccaaagtattgaccagtggctgtcagagctcacggacaagcagcgtgaagtggtgattcgccgcttcggcctgcgcggccatgagagcagcaccctggaggatgtgggcctggagattggcctgacccgtgagcgggtgcggcagatccaggtagagggcctcaagcgcttgcgcgagatcctggagaagaatggcttgtcgagtgagtcgttgttccaataacgattggtagggcagcgatgacaaaacgcccgatgcatgtgaatgcaccgggcgttttgctgtgccctgatcgttcccatgctctgcgtgggaatgcagccctggacgctcggcgtcccaaagcgcgacgccgagcgtcacaagaggcgttcccacgcagagcgcgggaacgatcaggcatcccgaaatccaggcataaaaaaaccccgcttttaagggcggggttttttcgactaagtcagtacaagttagataacttgaacttcttcagcttgcatgcctttctgaccgcgggtagcgatgaaagaaacctgttggccttctttcaggcttttgaagccgtcggattggatagctttgaagtgaacgaacaggtcgtcaccggattgtggagtgatgaagccgaagcctttttcatcgttgaaccacttaacggtaccagtttggcgattagacatggtgtatctccttggacaaagttaactgcgactcaggaaaagccctggccgagactgagtgcaaagagcaggaaaaattcttggagatggttggatcgaaattcaacatatcgtgtagagattctcagtgacacaagcagcacagtggcgccaccttaaccctttttccggaacgtgccaatggtatttccgaaggtttctctattttcgtgactggcggtggtatttacagtcattgatgccggccatccgggccccggctacgctggctgcggcttatagctggcggtgcattcatcaagaaaacccgtgcggcctttgaaccccaacgccggccccggtaagatggcccacagatttttttcgcctcgctattcaggacaccgccatgagcatcaaatcggacaagtggattcgccgcatggcgcaggaacacggcatgatcgagccgttcgtcgaacgccagattcgtggcgaaggcgacgagcgcgtgatttcgtacggcgtttccagctatggctacgacgtgcgttgcgccgatgaattcaaggtgttcaccaacatcaattcggcgatcgtcgatccgaaaaacttcgacgaaaagagcttcgtcgacgtcaagagcgacgtgtgcatcatcccgcccaactctttcgccctggcgcgcaccgtggagttcttccgtattcctcgcgacgtgctgaccatctgcctgggtaaaagcacctacgcccgctgcggcattatcgtcaacgtcacgccgcttgagcctgagtgggaaggccacgtgaccctggaattctccaacaccaccactttgccggcgaaaatctacgccaacgaaggcgtggcacaaatgctgttcttgcagtccgacgaggcctgtgaagtgtcctacaaagaccgtgcgggcaagtatcagggccaacgcggcgtcactctcccacgcgcttgatctaaagctcctacgggcaaagggaatttgtctgcagaaagtgactctatctaggtgtactgcttcggcgcgtgtgaaacgcgccgggccatacttgaggagtaccctatgaagatcgacccgcgaatcagcgcagaactcgcccggcttgaacccaaccagattggtgttctggcctggtccctgatggccaaccccgcgcacgggggcggcatccccggtcaacctgaacctgattacccgcagcctaccgagccgggtgagccgaccttaccggacgagccaccacccgcgcctgttgcctgatacctgagcgggccttatcgattcattgaatcggccagacttggtgatcgccgatcacaaagattcgctggtcttgggcctgctccacggcataaccccctgtaaacgcgccaaaggctggcagcaggctaacctgagcgccgatctggaagcacggcaagcgcagccgttggcgccctttgcctcgcaggtggtacaccggatgcacatgccccgccagtacatggtggctgacgtgtgcctctggctcatgctgcaaggcgaaagggcccattagcaggggctcggggaccacctcaatggccaaatccagcggtgggtcgccggcgcgtttgtcgtgatttccgcgaatcaaggtcaaggccagtgggcgattgcgctcacgccaggccctgatggcgttcagggtgccgctggcgtgagagccagggccgtgcaggaaatcgccgagaaagatcaactgcgcgcacggcagggccgataacagcttgtccaggcgttccaggttggccgtagtcgtgccctgtggcaccggctgccccaggctgcgataggccgacgccttgccaaaatgcgcgtcggcaatcaataggcatcgacgtgcgggccaatacacggccttgtccggcaatagccatagctcttcgccttccagcatcagtgggtaatgcatcagccttgccctttgtcggcgactttttccaggtccttgaccatccgcgcgatgcgctccgaaagcttttccgaactcatgctttcgcgcatccgttctaccagcagcgggaaggccaggggtgtgggccgctggatcgtgtgcaggtccagcctcagcgtcgacagatgattcagcgtgtgttccagccggcgaatatccaattcatcacgcagaacttcttcaccggcctgggccagcagcaggttctgcgggtcatattgcttgaacacctcaaagaacaagccgctggaagcctgcacttgtcgcgtgcttttcggcgcgccgggatacccggcaaataccagcccggcgattcgcgcaatctcgcgaaagcggcgcagggccagttcgccggcattgaggctggcgatcacgtcagccagcaggtcttgggggctcagcaacgtagcgttcaacagctggggccactgcacctcggtggcgctcaacagctccaggccataatcattcaccgcaatcgagaaggtcagcggctgctgttggctgacccgccaggccagcaaactggccaagcccaggtgtacctggcggccagcgaaggggtacagaaacaggtgccagccttcccgcgaacgcagggtttcagccagcaaatgctcacgggtcggcaggccggaccagcgcaattgggtgtgcagcaacggttgcaccgcctgcatctccgggccgtcgaactgcccatgggcggcggcatcaaaacgctcgactaccgcctgggccagttcgttggaaaggggcatgcgcccgccattccagcgtggcacggcggcttttttcgcggtgctgcgacgtacataggcggtcatggtttccacgcgcaccagttccagcaagcgtccggcgaacagaaacccatcccccggcttgagccttgcaataaacccttcctcgacactgcccaggttcttgccgccgccgcccttgctccagaacttgagctggatactggcatcactgacgatggtgccgacgctcatgcgatggcggcgtgcgaggcgtgcatccgggacacgccagatgccgtgctcatcgggctccacgcggcggtaatccggataagcggtgagtgacaggccaccatggcgcacaaaccccagggtccaggcccaatccgcttcggtgaggtcgcgataggcccaggcgccgcgcacttcgtccaacagtgctgccggagtaaacccgccgcccaaggccatgctgaccaagtgttggaccagcacatccagcggcttgtaaggtgattcccgcgcttcgatgtgccgttgggcgatcgcatcctgggcggccgcggcttccaccaactccaggctgtgggtgggcaccagcgttacccgtgagggccgccctggcgcgtggccggaacgcccggcgcgttgcatcaaccgcgctacgcccttggcggaaccaatttgcagcacccgttccaccggcaggaagtccacgcccaggtcgaggctggaggtgcacaccaccgccttgagttgcccgtctttcaacgcccgctccacccagtcgcgggtctcgcgcgataacgaaccgtggtgcagggcaatcaagccggcccagtccggacgcgcgtccagaatcgcctggtaccagatctccgattgcgcccgagtattggtaaataccaggcaactgctgctggcctctacctcggcgaccacctgcggcaacatcttcaaaccgatatgcccggcccaaggaaagcgctcggtgacgggcggcagcaaggtgtcgaccttcagtgccttggccgtttgcccctgtacattaatgccgtcgccctgtgggaccagtacttccaaagcgtgggcctgattacccagcgtcgcggaaataccccacaccatcaactcagggtgccagcgccgcaagcgtgccagcgccagttgcaactgcacgccacgcttattgccgatcagttcatgccattcatccacgatgaccatgcgcaggtgcgccaggctggtctcactgtcggcgcgggccagcatcaacgtgaggctttccggggtggtgaccagggcggtgggttggcgacgggtctggcgcgcgcgttcactgctgctggtatcaccggtgcgcaggcccacgctccagggaatctgcaacgcctccagtggggcttgcagggcgcgtgcggagtcggcggccaaggcgcgcatcggcgtgatccacagcacggtcagcggctcggcaggcggtttgcgtttgcctgtgacgggcgggcgggtgatggcgaaacgattgagggcggcaaaccagagggcataggttttacccgccccagtgctggcatgcagtaaccccgactggccggccttgaccgcggcccatacctctttctgaaaggcgaatggcttccacccttgggtggcaaaccattgcttggcgaagtcggggttttttgccatgcggcagcggacgctctggaggggttagttcaaagacccttcaggcaccgccgacgttcaactgtaggagcgggctagcccgcgaaaaaggcccaggcaccgtgtttctccaggttgccggcgttatcgttgacgattttcgcgagcaagctcgctcctacttcaagttgccgctcaaaaattgttgcaggcgttcgctcttcggattgcccagcacatcctctggcaggccttgctcctccacccggccctgatgcaggaacagcacctggcttgagaccttgcgcgcaaagctcatctcgtgggtcaccatgatcatggtgcggccttcctcggccaggccttggatcaccttcaacacttcgcccaccagctccgggtccagggctgatgtgggttcatcgaacagcatcacctccggctccatcgccagggcgcgggcgatggcgacgcgttgttgctggccacctgacaggaacgccgggtattgatcggccacgcgcgccggcagcccgactttgtccaggtagcggcgggcgcggtcctcagcgtcctttttgctgcaacccagcacacgccgaggggccatggtgatgttttccagcacgctcatgtggctccacaagttgaagtgctggaacaccatcgccagccgcgtgcgcaggcgttgcagctcggcatcgtcggccacgcgcataccctggcggtcgctgaccatgcggatcgcttggccgtccagggtcatggcgccatcgttgggggtttccaaaaagttgatacagcgcaggaaggtactcttgcctgagccactggcgccgatcaagctgatcacatcaccggtcttggccttgagcgacacacctttgagcacttgattgtcgccatagcttttgtgcaggccttcaacggtcagtttgtacatggggcgtgcatcctcaaggcgaaagtagataaccgctgcggtagacctgtgtgccggcgacatggcagatcaccatgccggccgtggtcatgcggcgtagcgagcgggcgtaaagcagcccggcgtgctggcagtgcacaggcgttacgcggtctgtaatggggtcgatgatgtcggcgacccattgcccggcctccaggtattcgcctggcagagcgttgaataccagcaagccacccaccggggtagtcaccggctccaccgccgccagcggcgtagccgggtaggccagggcaggcaagggggctgcatcgccgtgaatggcgccgaagtggatcaaataatcaatgatggcctggcagtccagcgcggcgaggccgtgattgacatcgccctggccgcgcaattcgacggtcactgacaagctgcccatggggatcgggtagcgttcgccgaagcgttgctgcaattgccaccacaccagggtgaaacattcgtcaaaagactgcccgccggaatcggtagccaacaggttggcctccgagcccaggtagcgcgccaacggctctacctgtggccaggcttcgggcgtggtgtacaggtgcgccacggcttcgaagtcgcaatgcaggtccagcaccacgtcggcatcacaggccaggcgttgcaacaccaggcgttgggagtgcaactgggtctgagcggtgtgcgcggccaaggcgtgggacagtgcgctgcggatcaattgggcattgcgctggggatcatcgcccagcaggtcttcgacctggttgccgacgtcttcgctgagatcgacgaacaggcgattgaagttctgcccgctttccagttcgtagcggcccaaggggatgtccatcaacacctgttccaggcccaccgggttggcgaccggcaccagcacgatttcgctgcgcaagcgcccggccgtttcaagttctgccaggcgtgccttcaggtgccaggccaccagcatgcccggcaattcatcggcatgcagggaggactggatgtacaccttgccttcgggctgctgcgggccgaagtgaaaactgtggatctgccgcgccgtgccgggcaccggcgcgatcaggtcatgtagctgatggcgcatgcaaactccttagtggctcggcccgagaaaggccagccaacgacgttccgccaggcgaaacagaccgaccagggcgaaggtcaccgtcagatagatcagtgcggcaatgccgaatgactggaaggtcatgaaggtggcggagttggcgtcccgcgcaaccttgaggatgtccgggatcgttgcggtaaaggccaccgtggttgagtgcagcatcaggatcacttcgttgctgtagtagggcaacgagcgtcgcaacgccgaaggcatgatcacataggcgtacagcttccagccgctgaggccgtaagccttggccgcctcgacttcgccgtgggccatgctgcggatcgccccggcgaagatctccgtggtgtaggcgcaggtgttgagggcgaaggcgagcagggtgcagttcatcgcatcgcgaaagaacgcatccagcaccggttgtgcccgcacggcggcaaggctgtagatgccggtgtagcagatcagcaattggatatagagcggcgtaccgcgaaacaggtaggtgtagaactgcacgggccaacgcaccaggcgcttgcgcgaaacgcgggcgatggacagtgggatcgacaccagaaagccgatcaccagcgaggcactgagcaaccacaaggtcatggccaggccggtgatgtgctggccgtcgctataaagaaaggggcgccagtattcctgcaatagctcgatcatcgcactgcctcccgggcgcctgcggagtagcgacgttcaagtcggcgcaagacaaagtttgaggcgctggtgatcaacaggtagatcagcgccgccagcaccaggaaataaaacagttgataggtgctcttgccagcgtcctgggcggcttttaccaggtctgccaggccgatgatcgacaccagtgcggtggccttgagcatcaccatccagttattgccgatgcccggcagcgcaaagcgcatcatctgcgggaaggtcacgtagcgaaaccgctgcccgcgcttgagcccgtaagcggtggcggcttcgagttggccgcggggcacggcgagaatcgcgccgcgaaaggtttcggtgaaatacgccccgtagataaagcccagggtgatcaccccggcgctgaacgggtcgatctcgatgtattcccattccataaagtcggtaaagccgctgagccaggtttgcaggctgtagaaaatcagcagcatcagcaccaggtccggtaccccgcgaatcagggtggtgtagagctgggcggggatacgcacaatggccaggctggacagtttggcgctggcgccgagcaggcccagcaagacgctgacggccagggacagcaccgacaacttgatggtcatccaggtaccttgcagcaacagcgggccgaaaccctttaggctgaatgcgctcagcccgagggtttgcaacagatcttcgaacataaatcaggacctatggcgataaaaaagcgccccgcccgaagcagggcgccccaggcattatttgccgctgtacaggttcagatcgccaaagtgtttcttctggatagtggcgtaggtgccatcatcgtgtaacgctttgatacctttatccaaaagcgccttgagttcggtgttaccttttttgataccgaccgcggttttcgacggcagcagcgggtcgtcaatcgcggcgctcacttcatagccggcaccggctggcgacttgagaaagcccagttcggcttgcagcatgtcctgcacggaagcgtcaaggcgcccggaggtcaggtcggcgtacacctggtcctggttggcgtaagccttggtggtcaccccggctttatccagcacagccttggcgtaggcttcctggatggtgccttgctcgtagccgacggatttgcccttgagagagtctggcgtcgaatagccagcgcctttcttgaacaccagtgaagtcgggccggagaacagctcggaggagaagtcgatggccttctcgcgcactggggtcacggtcatcgacgaaatcacgccatcgaatttattggctttcaggcccgggatcatgccgtcgaagtcactttcgacccacttgcacttgaccttcagctccgcgcagatcgcattgcccaggtcgatatcgaagcccaccaggctgccgtcggcggccttggattcgaacggtgcgtaggaagggtcgacaccaaaacgcaattccttgtattccttggctgtagcaacaccagcagccatgcacagagccagtgcagaaagggtcagcaatgcttttttcattaggtaatccctggaaaccaagataagcgcttgtggcgcgattaggactgttactgaacggtgtcagacccatcacaagtagcaatttctgcaccatagttccggatgggctttttaaaaggtgggataaggccgtttcaagtgtaggcggtgcccgaaagtgggcatggaatttccagcgcaccattgtggaactgtcgctgatcaaaaggtgggagctggcttgcctgcgatagcgtgggtcagttgttacatggggtagctgactcaccgtcatcgcaggcaagccagctcctacaaggggctggatcaggtcagcaggtcttgtagcgtggccaggttgtccgcttcctccacggccttatcctggcgccagcgcagcatccgcggaaaccgcaccgcaatcccgctcttgtgccgcttggacagggcaattccttcgaaacccagctcaaacaccatgctcggcgtcacgctgctgaccgggccgaacttctccaccgtggttttgcgcacaatggcgtcgaccttgcgcatttcctcgtcggtcagcccggaatacgccttggcgaacggcaccagggtgcgctcgctgcccggcgggccgtcccatacggcgaaggtgtagtcactgtagaggctggcgcgccgaccatggccgcgctgggcgtagatcaacacggcgtcgacgctgaaggggtcgaccttccacttccaccacaggcccatgtctttggtgcggcccacgccgtagaggcccttgcgatccttgagcatcatgccttccacccccaggctgcgagaggcttcgcgctgcgcggccaaggctgcccaggtcttgccttccagcaagggcgagggcaataacaccggttggttgcaccccgcgatcacctgttccaattgggtacgacgttcggcctgggtgtggttgcgccagtcgtcgccctgatattccagcaggtcgtaggcgagcaccgccactggcgcatcctctagcacttttttactcaaggttttgcggccaatgcgctgttgcagcagcgcgaagggttgcaccgagtctttccacaccacgatttcgccatcaatcaccgtaccgtcgggcaggccactgaccaggctgtggagttcagggaaacgttcagtcagcaactcttcaccgcgagaccagacccacaggcgcccctcgcgcttgaccagttgtgcgcgaatgccatcaaacttccattccacctgccagtcggcgggcgaaccgagcagggtgtcgaattgctccaccggttgcgccagcccgtgagccagaaaaaacggatagggctgcccgccacgttgcgcgtgttcgtcggatgattcggcggcgatcagcttgaggtagccttcggctgtcggacggttcgacaggtcggtgtagcccaccagccgctgcgccacgcgcttgctgtcgaggtcggccatggcagcgagggcgcgggtcaccagcagtttggacaccccgacgcggaagctgccggtgatcaatttgatgcacaccatcaggctcggttggtccagttgcgcccacagcgctggcagccggtctgccaggtccatgggcggcagaccgcgcaggggcaggagtttttcttccagccatacggccaagccgtcttcggaagtgtagggggattctggcaggagcagggagatggtctcggccagatctcccaccgactggtagctctcttcgaacagccagggttcgataccggccgcttcggtggccatgtcccgtagcagacgtgtcggcaccaattgccggggccgcccgccgctaagaaagtacacagcccaggccgcatcggccggcggcgcctgcaggaagtaggcttgcagggcggcgagcttggcattgctggaagtggtggcgtcgaggttggcgtacagctcggcgaaggctttcatgccgtgacctcttcttcgtcatcgccgtattcggtgctgaagccttgggcatccaagcccttttcccgcaggtgacgtaccaacacacccaccgaaccatgggtgaccatcacccggtgtgcgccggtttgttcgatggcccacaacaagccaggccagtcggcgtggtccgaaagcacgaaaccacggtccacaccgcgccgccgccgtgtaccgcgcaggcgcatccagccgctggcgaaggcgtcgctgtagtcgccaaagcggcgcatccaggtactgccaccggcagagggcggggcgatgatcagggcttggcgcagcagtgggtcggtctttttgaagtcgccggcatacagcgtctcggggatgtagatgcccgcttcgcggtacacccggttcaacggctcgacggcgccgtggctgaggatcgggccgatgctggcgtccagcccatggaggatgcgttgggccttgccgaaggagtagcagaacaacacgctggctttgccgctggcgatattggcctgccaccagtcattgatcccggcaaaaatctgcgcctggggctgccagcggtaaatcggcaggccgaaggtggattcggtgataaaggtgtggcagggcaccggttcgaagggcgcgcaggtgccatcgggttcgaccttgtagtcgccggacgccacccagacttcgccctggtattccaggcgtacctgggccgaacccagtacatgcccggccggatgaaaacttaaggtcacgccgtgatgcaccaaccgttcgccgtaggccagggtttgcaggttgatgtcctggcccaggcgccagcgcaggataccttcgccgggggcggcggccaggtagtgttgattgccggtgcgggcgtggtcgccgtgggcgtgggtgatgactgcgcgttccactgggcgccaggggtcgatgtaaaaatcaccggcagggcagtagaggccttcggggcgggcgatgacgaggtccatggggttgccggggcggtgggcttgtcagttatgaggcggggctgggggtagaagttctatttgaatgcgggcagtgcagatgtgggtttgccttcgatgtcggcctgaaagccaacacctatctacctgacaccccgcgatccaactgtgggagcttgcttgcctgcgatggcggcctgacagccgacgcctatctacctgacaccccacgatctaaatgtgggagctggcttgcctgcgatgacgtcctgacagccgacacctatctacctgacaccccgcgatccaactgtgggagcgggcttgctcgcgaaggcggcctgacaggcgacactgttataccgagtacatatccatttctgcggtaacggccacttagggttccgccctgacggcggctcactttgcaaaagcggcaaagtaagcaaaacgctcttgccccaccactcggcccctcgcttaggctcggtgtgcccgnnnnnnnnnnnnnnnnnnnnnnnnnnnnnnnnnnnnnnnntggcatagttcgggctggccgggttgccggattggccgatgccgctctggcccatcattggttccgcctggccgaagtcgatgatcatgcgcagcgccgatacttgggtcgcgttgaaatcctggccccaggtgtacggtgccgggttcagggtgttgtgatcgccaccgctggcgaaggggccgcggatgacctggccgctggtgtttttccaggtggtgctgtgcagcttgccccactgccaggccttgtgatcggcgcccaattggctgtcgccagtagtgatggcggcggccagggtgcgagccaggatcgcgggtttgtcttctttttgcgcggtacgcgtgtcatcccagaatgggctgtcttcacggcccagcaggtggtcggcgatggccgagtaggacaggctgacgttgctgacgaaggctttccagctggcgctgttttccgggccgagtttgtcgaggaagatttgccgggcgctttcttgcaggaacagttcatagatcgccgcgtcagccgaggtggtcgccagtcgaccatcgaaggccatcaggcggtcgagcgcttcgcgggccctggcgcgttccgctgccggcaatgcatcgatggcctgcttgaggggcagggccatacccggcgcctggaacatgttcttgagcttggcggcgaagagggtggtctggtcgtattgcatggcgatcaggctgcggctgtcatgcttgccagcgttggccagttgcgccaggcgttcgctgcgctccggtgcatcccaggcgttggacagttgcatgccgtagccacgcggtgcggtacgctggttggcggtgccgatccagccctgggccgggtcttggtcgtacgggtgcagcatcgcgtcggcgtagccgtcccagtcaaagcgcgtgtcccagcccggcgatggcaacaggccttcgccttctcggcggttggggaagcggccggtgacttgccagccgatgttgctggcgtcggcgaagatcatgttcaaggctatggcgcgaatctcgcgggtggcatccgaggctttgccagcgttttgtgcacgggacaggtcgaagaatgcctccaggctcttgtcgtccttgaagtcggcggtttgcaaggccaggccaagaccgctggtgagcgcctggctgctgttgagcagagcgccgtggcgggtttcgtacaccacttcgcgaatcgagcgctggcccttgatgaagaaggtttcgttgcgcacgccggccggcagccatttgccgttgttctcgtagtacagcgcgttgccctggcgtttgaccttctccaggaacaggtcctgggtgtcgcccttgaccgcgctcatgctccacgccactttgccgttgaaaccggagagcagggtcggcaggccggcaatcgaagcaccggcggcctggtatttgggcgcacgaatctgcacgtagttccacggcgacggtgcttgtggctgcgcggcgatgtcgttggccaacaggctcttggcgctgcggctgcgttgcgggccaatggcccagttgcttgaggtggtgacgctcagggcgttgaggctgcgcaattgctggcctacggtttccagcccggcgaggccggtgatctggctcaggttgacgcctttgagcttgtcggcttcggccagcgggacaggttcgtccggtgcgcttggggtgagccaggcgagtttgtcgacgccgaccttttgcgccagcaccagggacgagagctccccctgcaggttgctcgactggctgaaattgagcaggcagaacagcagcgccgaatcttccggcttccagtactcgggcttgtagccgctctgggccaggtccgccggcagcttgtcgcggtagcggaacaggtaggcgttgacgcctcgggcatacacttcaaagaagcgtttgaggcgtggcgatgaggcattgtacaactcgccagcgcttttcttgaggttgaccgcccgcatgaagcggtcgacatccagcacttgcgggcccgacatttccgccagacggccctgagccagcaggcgcagagtgaccatctgggtgatgcggtcgctggcgtgcacgtaaccgaggctgaacagagcgtcgtggaaagtgttgctttcgatcagcggcatgccttgggcattgcggcgcaccgacacattctgtgccaggcccttgatcggctgcacgccagcaacgggcggcagggtgtcctgggtgttctggagctggcaaccggccaggcccaaggcactgaccactgccgcggcaacgccgaaccggggaagaaaatgtaagagggctggcgaggccatggcaaagctcctgcggggggtagcgtcagtaaaggcgctacgttagtgagcgcggcgaaacgacgcaagcgggagttttggcaattgcgtgagaacttgaaacagccgcccattgaggtgggggctggtttaaggctttgtaggagcgagcttgctcgcgagaaacccatgggcgctgtgtttattcaggaaacacgcgtaatcgttgacgtttttcgcgagcaagctcgctcctacacgtgcggtttaagcgccgtggcacttcttgaatttcttctcgctgccgcacgggcaggggtcgttgcgaccgacgtccttcaacgcattgcgcaccggctcttggtgagcgtggccgcagttcgggccgtggacatggccgtggtcgtgatcatggtggtcatgatcgtggttgcagtcaggaccatggacatggggttgctgtgtcatcgatgttgctccggaataaaatcgccggggattatctcgccattgtgtgccacctgcacgtcattaccgatgaataatccggttttcagttcgccttccagacgataaggcacgggccggtcgggatttttcagcatctgcaccacctcacgcacctgtggccagaggttggtgcgcaccgagaccttgaagaatttatgcccgcgtggcggtacggtcagccactcgttggactcgccttcggtcaacaccaggttgcccaggctgaccttgtagaccaggccgcgcacggtcaggtcggcgtcgtcgcgattgtccacgcgaaagtacagcttgaatttctgctccagcagcttggcccgtaccacttcgaccttgaccagggcaacgtggggcggcggcgcgtcgtcttcgaaccaggacgcgcagccggtcaggcccagggtcaacgccagcatcaagctatacatccgaagcatggcgttatccccgtccagtgattagaagtagctggaacagcacttcttgaatttctgcccactgccacacaaacaggcatcgttacgtccggccttcacttctaccgtagggtcgatgaagtaccagcgcccttcattctgtacgaaagaagactgctcgcggtgactatgttcaccggtagcgtcatgccagcgcgccgtaaaggtgacaaaggcgtgttccggctggccgccgaacacctcggagctttccacctcaaggcccagccaggtgctttgggcactccaggcggcaatggcgtcgcggtccaggccggcctgttgcgcaggcagcgtagtggcgaccaggtaatcgaccaggcccagtacataggcgctgtagcgcgagcgcatcaacgcgctggcgcagggggccgggtgaccggcgtgataatggccgcagcaggcatccagcagattgccgctgccgcacgggcaaatggatgtactcatcgggttaccaccaatactttccgaagttttccgggttggcccagaagcgggcgttgagccagtccggcacctgtttatagtcaagcagatcataggtaaacagcgtcagtacctgatcatcgcgttggaagcgttcgccggcttgcagggccagggagaaaaagtcggtgtccttccagtcgcaggcgcccaggtcggccagcaccgcaatgcgactggcgttgaggttacgaatgccaccgagcaaggtcaggccttggggtttggtcaggtgctccaggcagtcgaccaccagcgcgaggtcaaagcgctgcaccgcgaggtcttccgacaacggccctggcgcggcatagaacacttcggtgtccgggtgcgcagctttgaaggcatccagcgccggaaaatggctggcgcccactaataacaggcgttttggcctgtgaaggtccagcagggccgccaaggcttgttggggcgtacgggcagaaattccagcggtcattgcagatcctcgcatcaagaccgtagagactagcgcggctgggcgcgtgggcctagagcgcggcggtcgatagccgccgggggagaactgaagttttttgatccttcactggcaaatcgcctgtagaagtcgttactgtgcgctcaaagaaaaatttgaaaacactcaggagccccatgatgcgtaaggtttttctgctggccctgttggtcagccccgttgccctggcccagagcgtcagtgtcgaaaccaattcattgatgcgcttgcccagcagtaccagcgtgttgcagctcgagcgtctggacgtggcggattacggcaccttgctgattccggccaccatcagccaggttacggtggatgagctgcacttggggcgcgacgcacgcatcaccattgttcccggcaataccgcactgcaaatgcaagtgcgcgatgcgcagttggagcacggtagccagatcacctctcggggcgctcccggcacccacgaaaaacccgccaaggctgggcgtgacctgaccttgcgcattaactcgctgactgccgaagcgctttcggtagatgcccgtggtggcgccggcgcccaaggatatgcgggcctggacggtgccaacggcgttgacccgggttgcacctggggctcagccgggcgcggtttcaatggcgataacggcggcgatggccggccaggggcggcgggcgcccaggtacgcctggagttgccgcaggcgttcccggctgaacagatcaaggtctgggtcgatggcgggcccggtggcctggctggggttgcgggcaaacccggcaagggcgggcagtccaagggctgcctggtgtaccgcgcggacggcggcgaaaagggccgtccagggttggaagggcaaccggggccggctgggcctgcggggtctgtgactatccagcggctctgagtcgcctggcctgacgctatcgcgagcaagcccggctcccacatttggaatgcattccagtgtgggagccgggcttgcccgcgatagcgtaaggctcgcctcagaacatcggccgagccgaagccactgccaccaccaccaatccgacaatcaagttaatccccaccaacttgcgaatctgccccagcgcagccgcgcccgccggccaatcttcagctgccaccgctgccttcagctccgggaacttcaacgcctggatgcggataaacagcgccgtcatcaccaggtacaagcccatcatcacctgcacataacgcggcgccgtttcaaaaccactgaagcgcaggtgcagcaaacccatgccgctgatcggcaaaagcaccaccgccacccatacccacacaaaaaaacgttgaaacacattcgcccatagcttgagccgggcagggccctcaagtgccgccatggcggcggggcgcaggatcatccaggcgaaaaacataccgccgacccagatcaaggcggccagtacatgcagggtataagcgaggctaaacgcggtcattgtggtactccgttctgcgcgggattaattagcggggtatgatagcggccgaaccgaaccactgaaaatttatccagcgttttttgcgcccgactatccatgatcagcactgaactcaaaaccacgatccagggcgcctactcgcgttttctcgaagccaagagcttgaaaccgcgctacggccaacgcctgatgatcgccgaagtggcaaaagtcctcggggatatcgacaccgacgacgaaggccgccgcgagggtgagcctgcggtagtagccgtcgaggccggtaccggtaccggcaagaccgtggcctacagcctggccgcgatccccacggccaaggccgctggcaagcgcctggtgatcgccaccgccaccgtcgcgctgcaagagcagattgtctacaaagacttgcccgacctgatgcgcaacagcggcttgagctttaccttcgccctggccaagggccgtggccgctacatgtgcctgtccaagctcgacgtattgctgcaggaaggccacgcccaaaccgccaccgcctccttgttcgaagaagaaggcttcaagatcgaggtggatgaggtcagccagaagctgtttaccagcatgatcgagaagctggccggcaacaaatgggacggcgaccgcgacagctggcccactgccctggaagactccgactgggcgcgcctgaccaccgaccacagccaatgcaccaaccgccactgccccaacttcggccagtgcgccttctacaaggcgcgcgaaggcatgggcaaagtggacgtcatcgtcaccaaccacgacatggtattggctgacctggccctgggcggcggtgcggtactgcccgacccccgcgacaccctctacgtcttcgacgagggtcaccacctgccagacaaggccattggccatttcgcccattacacgcgcctgcgttccacggccgactggctggaaaccaccgccaagaatctcaccaagttgctggcccagcacccgttacccggcgacctgggcaagctgatcgagcaagtgccggagctggcgcgcgagatcaagacccagcagcagttcatgttcagcgcctgcgagcaggtggcggacttcaagcccggtgaagacgtcgagggccgcgagcgcccgcgccatcgttttgtcggcgggatgatccccgagcacatgcgcgaaatgggcatcgagctgaagaaaggcttttcacgcctcaccgacctgttcacgcgcctgacggacttgctcaaggaaggcatggatggcgaggtcaatatcggcatcgccagtaaccaggccgaagagtggtaccccttgttcggcagcctgctgtctcgttcccaaggcaattgggagctgtggaccgcctttaccgtcgaagacccggaagacaacccgcccatggcccgttggctgacgctgtcggaaagcggtgcgctgttcgatatcgaggtcaacgccagtccgatcctcgccgccgaaatgctgcgccgcaacctgtggaacgtcgcctacggctgcctggtgacctcggccacgctgacagccctgggcacttttgaccgattccgcatgcgcgccggcctgccgaaaaaggccgttaccgccgtagtacccagcccgtttcatcacgctgacgccggcgtgctgcgggtaccagacctcaaggccgacccacgggacgcggccgcgcacacggcggcgatcattcgcgatctgccgtcgctggtagaaggctcccgcggcaccctggtgctgttctcgtcgcgcaagcagatgcaggacgtgttcgacggcctcgaccgcgactggcgcaagcaggtgtttatccagggcaacctgtccaagcaggaaaccctgaacaagcacaaggcgcgggtcgacggtggggattccagcgtgttgttcggcctggccagttttgccgaaggcgtggacttgcccggcgcttactgcgaacacgtggtgatcgccaagatcccgttctcggtgccggatgacccggtcgaggccgcactggccgagtggatcgaagcccgaggtggtaacccgtttatggaaatttcggtgccagatgcttcactgaagctggtacaggcctgcgggcggctgctgcgtaccgaagaagaccgcggcaccatcactttgctcgatcggcgcctggttacccagcgctatggcaaggcgatcctcaatgccttgccgccgttcagacgcgaaatttcttaagccactgtgggcggattcgcccactgcgtggtctatctcatcactatcgtcaggccagtcatcggccgtttgggagaactttgttcgtatgatccgcacgctgcccgctctttttgccctgctgttcgctgcgccgttgatggcggcgcccgaggggcaacaaacgctgttcaacttcgtcaggcctgccgatgtggtcaaggtggcgacccaggacgccagcctgccgcaatacaacgccgaacaaacccccgaaggcgaggtgctgcgccgcatcaccttcaacccagcggccgagccgagcctggtgctcagcccgcagacggggacgtgggattggtcgcaatcgagtgccatgagcctgcgtatccagagcgcgatgaactgggcgctgaccctttacgtcaaggtgcagagcgccgatggcaagacgctcgtcagccgcatcgacctgccggccggcccggcccagacgctgctcgtcccgctgcaagccaattcccccctgagccagggcatgaaggccggcccgccgatgccaatgaccgtggatggccagcgggtgttgctggccgccagtgccggggaaatcgaccgtagccaggtggtatcggtgaccttgtcgatgctcaagcccaatgccgcccagagcatcctgctggagcgcttcggcgtgcaggacagcgcgccggtattgaaggccgcctacactgaactggtggacggctatggtcagtccacccgtgcacgctggccggaaaaggtcagcagcgacgagcagctcaaggcatcggccgccaaggaacaacagcagctcaaggcctggctggccgagcgggacaagtcctcgctggatcaatacggcggctggaaaaagggcccgggcttcgacgccagcggttttttccgcacccagaagcgcgacggccgctggtacctggtgacgccggacgggcatccgttctactccctgggggtgaacaccgtggcgccggacaacagccagacctacgtggcggggcgcgagtggatgtttgcggcgctgcccaaggctggcgaaccctttgacaagtactacggcagcgacgacagccgcaccggcaacggcgccggtgaaggccgcggttttggctcggggcgttggtacgatttctacggcgccaacctgcaacgcacttacggcggtgacgcgttggaccagccacgctgggtgacccattccctcgatcgcctgcaagcctggggcttcaacaccgtcggcaactggagcgatccggacctggccactgccgaccgcgtgccgtacaccttgccgctgtcgattgtcggtgactatgccagtatcagcaccggcaccgactggtggggcggtatgcctgatccgtttgacccgcgctttgccatggccaccgaacgcgccgtggccatcgcggcacgcgatcaccgtgacgacccgtggttgatcggtttctttgccgacaacgaactggcctgggccggtcctggcgacgacgcaaaatcccgctacgccctggcgtacggcaccctgcgcatgaccaccgacgtcccggccaagcgcgctttcctcaagcaactgcgcgacaaataccgcaatgaagaaggcctttccaaagcctggggcattcaactggccggttgggaactgatggaagacccaggttttgagccgccgatgcctagccctgagcacccggaaatcgaagccgacttcaagtatttccagaagaccttcgccgatgcttacttcaaaaccatctccgactcgctgaagtggcatgcgcccaaccagctgttgctgggcggtcgctttgcggtgagtacgccggaagcggtcgcttcgtgcgcgcagtattgcgatgtgctgagcttcaacatgtacaccttgaaaccccaggacggttacgacttcgccgcgctgcgtgcgctggacaaaccggtactgatcaccgaattcaactttggctctgccgaccgcggcccgttctggggcggcgtgacgcaactggcccgcgaagaagaccgtggcgcggcttacaccaccttcctcaagcaggccgtggccgagccgtcgattgtcggggtgcactggttccagtacctggaccagccggtcaccgggcgtctgctggatggtgaaaacggccatttcggcctggtcggcatcaccgatgtaccgttccagggctttgtcgagacggtgcgcaagagcaacctggccgcgctcgaccagttgggccgtgaggcgcaaaaagccaaggccacgcaagcgatgcgtgaaagtgaagccggcaagccggggcgcgacggcaaaggcgcggggcagggcgctgggcatgctggtgggcacgctgggaatgggcattgattcaccgttgacgggttcacaaaacctacaatggctgaaagaatggcggctacttttcatggtgttttccgaggggacttaggtgcagattcagggtcattacgagctgcagttcgaagcggtgcgcgaagccttcgccgccctgttcgatgatcctcaggagcgtggtgccgggctgtgcatccagatcggcgggcaaaccgtcgtcgacctgtgggccggtactgccgacaaggacggtgccgaggcctggcacagcgataccatcgtcaacctgttctcctgcaccaagaccttcacggcagtgacggccctgcaactggtggccgaaggcaagctcaagctcgatgcgccggtggccgattactggccggagtttgccgctgctggcaaggaaacgatcacgctgcgccagttgctctgccaccaggccgggctgcccgccatccgcgaaatgctgcccaccgaagccctgtatgactggcaattgatggtcgataccctggcggccgaggccccgtggtggaccccgggccagggccatggctatgaggcgatcacctacggctggctggttggcgaactgttgcgccgcgccgatgggcgcgggccgggggagtcgatcgtggcgcgggtggcacgcccattggggctggacttccatgtgggcttggcggatgaagagttttatcgcgtcgcccatatcgcgcgcagcaagggcactatgggtgatgaagccgcgcaacggttacttcaagtaatgatgcgcgagcctgcggcgatgactacccgtgcatttgccaacccaccgtctattttgaccagcactaataagcccgaatggcgacgcatgcagcagcctgcggcgaatggccacggtaatgcgcgcagcctggccgggttttatagtggtttgttggacggtagtttgctggaaagcgacatgctcgaacaattgacccgcgagcacagtatcgggctggataaaaccttattgacccaaacccgcttcggcctgggctgcatgttggatcaaccgcagttgcccaatgccacgttcggccttgggccccgtgcattcgggcatccaggggcagggggctcagtcggctttgccgaccctgaacatgatgtagccttcggttttgtgactaataccctggggccttacgtacttatggacccgcgtgcccagaagttggtcggaatattggccggttgtctataaaccccttgctgtttcacaattttttgttacaaaggcaagtataaaaaagatgctgaacgacatgttgtaacttgaatgttcttttagcgtctgtttaacgggtcccgcgaccccctgtttttctcattttgtggatatctcatgttatcgaacaagtctttggcactggcgctgtgcctcactattacgggttgtgcacaaactccacaaaatgatgccgaaggtgggcattggtggtcatttggatctgacaaagctgcaaccaaggatccagtggcccagaccgacgccaagccggataccaagcccgacgccaagccggccgcgggtgccaagcctgttgaacctgtcgccgctgcagcagcgcctgccaaggctgacaccggttacagctggtggccgttttccaccaagagtgccgaagaaaaagctgccgacgccaaggctgacttgaaggccgacctgaaggccgcaaccccggcctcggacgcggcgccagtcgtcgccaagaccgacagcgagccgcgttggtggtggccgttcgaaagcaagccaaagccgttggccaaggtcgacgtgaccaacgtacaaatgcctgacccgaagatcacccaagcctggctggacgaatacgaaccacgcttgcgtgcggctatcaaggacagcaacctgcaacttgagcgccgtgacaacaccctggtggtgattgccccggtagacggttcctacaaccccaagcgcccggccatgttgctgccggtgaccctgggcccgttcacgcgggtggccaaggccgttgaagctgacccgaaaaccgccgtactggtgctgggccacgttgatgccactggcagcgctcccgccagccaggcgttgagcaaggaacgtgcgcagtccattgcctcgattttcagcctgagtggtctgaaacaggatcgcttgatgctgcgtggcatgggcgaccttatgccgcgtgccgccaacgacagcaatcaggggcgtgcgctgaaccgtcgcatggaaatcatgttcactcagcgtacaacgatgttggcactgctgagcaagtacaactcgggcaaaactccgcccgtagctgaaatggtcgcggtgcagaatgtgcctgcgccagcaccggcggcaaaagcgcctgccaaaaaggccacggccaagaaagcggccgccaagccagcggctaaaaaggctgcggccaagccggctgccaagaagccggctactgcaaaagccaaggcggcacccgcttcgaacgaccaggcgaaaaactgagctgttgaaccacaaggataaagccgcatgacccaggcactggccgatatgcgccgtgactacacacgggacggtttgagcgaggcccaggccccggacgagccgtttgcgttgttccaccaatggtttggcgatgcggttaaaaccgaacagccgccagtggaggccaatgccatgacgttggcgacggtcgaccatgacggtcgcccgcactgccgcatcctgctgctcaagggtctggatgcacagggctttaccttcttcaccaactatcagagcgccaagggtgaacaactcgcggcgcggccgttcgcggccatgaccttcttctggccaactctggagcgccaggtacgcattgaagggcgcgtggtcaaggtcacgcctgaagagtcggatgcttattaccaggtgcgcccgttgggcagccgcctgggcgcttgggcctctccgcagagcaaggtcatccgtgatcgcgaagagctgcaggcgctgctcaaggccactgaagagcgtttcagcgatacccagcccgattgccccgagcattggggagggtaccgtttactgcccgagcgcatcgagttctggcaaggccgcgccagccgcctgcatgatcgcctcaactatcgtttgcaagacggccaatggtcgcgcgagcgtctggcgccctgagcgtcacctttcgtcatcccacctgaatcaacaccgttgcgtcgaagtctttgttcaagagacttcgagcgctttcggctgtgcggctacactgatcgagccggttatggcatcgttctgtaccctggcttggttaccgttcgtcgagttctctggtgctggcagtctgtactcaggctgaatgaaagcaagtttctgcctggcgcgccgtgacacgcgccaagccacagcgtttaatgaatacctgtcctttggagttgatgctatgcgtaagtccgttttactagttgcctgctttaccaccctgtcgttgctgttgggtggctgcgcctcgagtctgaccggcgactcgtactctcgtgatgaggcgcgtcgtgtacagaccgttcgcatgggcaccatcgaatccctgcgcccggtgaaaatcgaaggcaccaagaccccaatcggcggcgctgcgggcgcagtcatcggcggcgttggcggtagcgccatcggtggcggccgtggcagcatcgtcactgctgtgatcggcgcagttgcgggcggcctgctgggctcggccactgaagaaggcctgacccgcacccagggcgtggaaatcaccgtgcgcgaagacgacggcagcatgcgcgcctacgtacaagccgtgcaggaaaatgaaatcttccgcattggcgaccgcgtacgcatcatgaccgtcgacggtaccagccgcgtgactcgctaagccttaaactacaggcgaagaaaaacccccaaccgggtgaccggttggggggttttttgtaggagcgagcttgctcgcgaaaaacgttaacgataacgataacgcgtgctcaatgaacgcggcgcctgtaagtttttcgcgagcaagctcgctcctacttcaatcatgcaacgatcgctttcttgcggcttgccatcgccgttaccgcatacccgataaaggctgccaggatcgacccggtcagaatccccatgcggtcttcaccggcaaactcactggcgcctggcacaaacgccagggagccgacaaacaggctcatggtgaagccgatcccgcacaggatcgccacgcccattacctggccccaattggcgccgctgggcagtgaggcgatgccggtcttgatcgccagccaggtgaggccgaacacaccgacggtcttgccgatcaacaggccggcggcgatgcccatgggcacggagtgggtgaagctttccaggctgacgcccgtcagagagaccccggcgttggcgaacgcgaacagcggcaggatggcgtaggccacccatgggtgcagggcgtgttccaggctcagcagcggcgaggtttcggcattcttggtgcgcagtggaatgcagaacgccagggttacacccgccaacgtcgcatgtacaccgctcttgagcacgcacacccacaggatcaggccgatgatcatatacggccccagcttgatcacgcccaggcggttcatcgcaatcagcgcaatcaagcacgcccccgcgcccgccagggatgcggtggacaggtctgcggaatagaacagggcaatgacgatgatggccccaaggtcatcaatgattgccagggtcatcaggaacagcttcagcgacaccggtacgcgcttgcccagcagggctaaaacgcccagcgcaaaggcaatgtcggtggccatagggatcgcccagccagccagggcggcggggttgtccttgttcagcgcccagtagatcagcgccggcaccaccatgccgccgatggccgctgcgccaggcagcaccacttgggaaggcttggacaggtggccatccaaaagctcgcgcttgacctccaggccgatcagcaggaagaacagggccatcaagccatcgttgatccaaagcagcgccggcttggcgattttcagcgcgccaacctgtgcaaccactggcgtgtcgagaaaggcgttgtacaggtgcgacaacggtgagttgttgataatcagcgccaaggcggcagcggcgatcaacaacaggccactggcggcttccagctggaagaaacgggtgaaagtgctacgcagaggcaagggatgctctccaatccaggttcaataggtgggtaccctaacccgtaccgttagttgttaaaacaaaagttatattcttatttgttataagagatggcccgggacatcggtgagccaaagactagcaattgtgtgtccaattgcgtcgtcactgtatctgtgtggagtgtaggaaacatcttaagatcaccgctgaaaacctttagagaagccaccatgagcgaccaccatacctgggcccgcgaagccattcgcatcattgaagcggacttccagcgcagcgccgatacccacctgatcccgctgccattaccgggtttgccaggcatcgagttgtacttcaaggatgagtccagccaccccactggcagcttgaaacaccggttggcgcgctcgctgtttctgtatgcgctgtgcaacggctggctcaagccgggcgcccccgttatcgaagcgtccagcggctccacggcgatctcggaagcctacttcgcgcgcttgcttggcttgccgtttattgccgtcatgcccgcaactacatctcaagagaagatcgcccaaattgccttctacgggggcaaaagccatctggtccaggacccgacgcagatctacgccgagtccgaacgcctggcccaggaaagcggtggtcacttcatggaccagttcacctacgccgaacgtgccaccgactggcgggcgaacaacaatattgccgagtcgatcttccagcagatgcgttttgaacagcacccggagccgagttggctgatttccagccctggcaccggcggcaccaccgcgaccctnnnnnnnnnnnnnnnnnnnnnnnnnnnnnnnnnnnnnnnnacacccgccgacagaatcccaccggcatagcctgcgccttcaccggccgggaacaggcctttgacgttcaggctctgcatcgactcattgcgggtaatgcgcaacggcgacgaagtgcgggtctcgatgccggtcagcaccgcatcgtgcagcgagtagcctttgatctgcttctcgaacgccggcaaggcttcgcggatggcttcgatggcgaagtccggcaaggccagggccaggtcgcccaatgacacgccaggtttgtaggacggctccacactgcctagcgcggtggagggcttgccggcgatgaagtcgcccaccaattgcgcgggggcctcgtagttactgccgccgaggatgtaggcgtgggactccaggcgctcctgcaactcgatacccgccagcgggccgcccgggtaatccacctcgggggtgatgcctaccacgatgcccgagttggcattgcgctcgttacgcgagtattggctcatgccgttggtcacgacgcgatggggttccgaggtcgcagccacgacggtgccgcccgggcacatgcagaagctgtagaccgaacggccattcttggcgtggtgcaccagcttgtagtccgctgcgcccagcttcgggtggccagcgtatttgcccaggcgtgcggcgtcgatcagcgactgcgggtgctcgatacggaaacccaccgagaacggcttggcttccatgtacacgccacggtcgtggagcatgcggaaggtgtcacgggcgctgtggcccagggcaagaatcacgtgcttggagaggatttgctcgccgccgtcgatgaccacgccgttcaactggccgtcttcgatcagcacgtcggtgacccgctgttcgaagcgcacttcaccgcccagggcgatgatctgctcacgcatgttttccaccacgccggtcaggcggaaggtgccgatgtgcggcttgctgacgtagaggatttcttccggcgcaccggccttgacgaactcgtgcagcactttgcgaccgtggaatttagggtccttgatctggctgtacagcttgccgtcggagaaggtaccggcgccgccttcaccaaattgcacgttggattcggggttgagcacgcttttgcgccacaggccccaggtgtccttggtgcgttggcgcacttccttgccgcgttcgaggatgatcggcttgaagcccatctgtgccagcagcagcccggcgaaaatcccgcaggggccaaagcccaccacgattggccgctcagccaggccttccggcgcctggcccaccaccttgtagctgacgtccggtgccggattgacgttgcgatcatcggcaaacttgagcagcagaggggcttcacccttcacgttcaggtcgacggtgtagatgaagcacagctcagaggtctttttacgcgcatcgtagctgcgcttgaacagggtgaaatcgagcaggtcatcactggcgatgcccaggcgctgcacgatggccgtgcgcaggtcttcttcgggatggtcgatgggcagcttgagttcagtgattcgtaacatgacaggatccggtaggcggcgggcaagaaggccggctgttttgcaaaccggcgattataagccccaatggcgactttccgtcaggttaatcgtcccgcgagccgccgaacgccgcgcaaccgcgctgcacctggccgttcacgcgcaactcggcgctcatgtgttgcaggctgccgctcacactgtcgacgcagcgctggggcgccacccacagttcgatgtgctggttattggcctcggtcatcaggttgaaacggccgtcgcccagttgttcctcgacgtacggcactgccaaaggtggctggccttcgcgttccagcaccatgcccttggccgtgacattcattgcccaggcgggtttatggccattggcccgcaggatcatgcgcttgaagtccgggtcggagcaggctgaggtcgagcgttcgacgcgatacagctgttgcaggtccactgagccctgggtgccgctggcgacgccggaaaatttgccacgcaggtcggcaaacaacatgccctgctggccggccagcgaggccgcttcctgcaggacactggtgccgccggtgtcgttgaccacgtagctgcgctggtcgccgcatggctgaaacagcagtttgccgtccaccgccgtcaactcaccctgcatacgggtcagcccgacagtcgatggcttggccggctcgctttcaaacaattggcaagcggcgaacagaggaagcaaggcaaacagggcgagggtacgggcggcgcgcattatcgggtctccaggcaagtgccgccacgttacgcaggctggccgtgcatcacaagcccgcttgccagcttcaggcgtttcttacggatctcaccttcaacctacgataaaggtctgaccggtttgcaggccttcgacgctttttgcgtacgccagcgccacatcggcggcgggagcaggtttgtagccgcggaaataaggggcatagctgcccatggcttccagcaacaccgtcgggctgaccgagttgatgcgcaggccgcgtggcaactcaatggccgccgctttgacgaaggcgtccaatgcaccgttgaccaaagccgccgaagcgccggtgcggatcggatcacggttcagaatgccgctggtgaacgtgaacgaagcgccatcgttggcgtactcacgaccgatcaacagcaggttgacctggcccatcagcttgtcacgcaggcccagttcgaaatcgctgtcgttcatgtctgccaggggcacgaagttgacgttgcctgccgcgcagatcagggcgtcgaacttgccggtctgctcgaacagccggcggagcgaggcgctatcgctgatatccacctgaaagtcgccgctggtgcggccgatgctgatcacttcgtggcgctgggccagttgcgccttgaccgctgaaccgatggtgccgctggcaccgatcaataggattttcatcgtgctgttcctctgggctgattccctgtaggagcgagcttgctcgcgaagaacgtcaacgatcacgcggtaaaactgactacacggcggcgatcttgagtttttcgggagcaagctcgctcctacagtggtatgggtttgcattcagtctagtgtggctttttagtcggataaacgcgctaataggcaacctttggttttcaaatggaaacaatccatgagcgaaatggatgacctggcggcgttcgccgtgctgatcgaggccggtagtttcaccgtagcggccgcacaattgggctgcagcaaagggcagttgtccaagcgcatcagccagttggaagcgcagttcgccgtggtactgctgcaccgcaccacgcgcaagctgagcctcaccgctgccggcgcggcgttgctgccccaggcacaagcgttggtggtgcaggtggagcgcgcccgtcaggccttggcgcgactcaaagatgatttggccggccctgtgcgtatgaccgttccggtgtcgttgggcgaaaccttcttcgatggtttgttgctggaattctccaagcagtatccccaggtgcagatcgagctggagctcaataacagctaccgagacttggcacgggatggctttgacttgggcgtacgctccggcgccatcgaacatgaacgcctggtggccaaacccttgctggcctggcatgaaatgacctgcgccagcccggcttatctggaacagcatggcgaaccactgaccccggcggacctggcggcgcacagctgtctgctcaacagccattacagcggccgcgaggaatggttgtaccaccagcaacacgaattgctgcgggtaaaggtgagcggcaccttcgcctccaaccactacaacctgctgaaaaaagccgcgttggtcggcgccggtattgcccgcctgccgtcctacgttctacccgcggaactggctgacggccgattgcgctggctgctgcgcgactatcagacacgcagcatgccgatgtacctggtgcatccctaccagggcggcctgccacggcgtacccaggtgttggccgactacctggtggactggttcaagcgcagcggcgaagcgctggatcggcttcagcgatagcggcgggcaatcaggtggtcgatggacaggcagcctgggcctttggcaagcaacagcaataacagcgcaagccaggtgccgtgagtgggataggcgtcagggtagacgaacagctggatggtcaaggtcatgccgatcaaggccagggccgaaaaacgcgtggcgaaccccagcaggatcaataccggaaaaaaatgttcggcaaaggttgccaggtgcgcggccacctgcggcgacagcagaggcaattggtattcgctgcgaaataaaaacagggtcgaggcggcaagtttgggctcaccccattggaaggtgccgctgatcaggtcaatggcaaagccttcgaccttggtctggccagacttccagaacaccgccgcaatggagaagcgcgcgataaaggcgatcaggctgtaagggattttttcaaacagtgcgacggttcgctttaccaggcagggagcgggaaagttcatggcgatacctcgggttgcagatgtaaatgggtgatggcgtcgtggctgatcaacagcgtaagacattggtgcaaatcgaattcgtcagaggcttgcagggcgtcagcgatggccatctccagccctgcgccttggttgagtcggttgataaaggtcacagacccgcggtcgatggcgaataccttgaccgccaacccttggcgcaagaccatcgcgccttgggcataccaggggttcaaagtggcgatagccccgtcgacctgatgcgccgcccaaaccgataccaccgcgtaggaagattccagcgtggcaagtgacggatgcagtcgtacacgcagttgtcccagttgtgcgcagccttgcagttgccgaagtacgctgtgctgatccagaacctggcaatccgccgcgtgataagcgcggaccctcaagcgttccagccgggcgacatcggccaggtagggcacgcttgaggccggttcgaaagcctggataaagtcagcgaacgtgccgccgtactcactgatcaacgggctgataggcgggtgggcctggacatacaggccggccatggcgcggaaaaactcatcgccgaccagttgccgcgccaccgggtaggcggccgccaaagcattgatcaacgcgctatggacattgtttcgatacaccgcaaagcggctcgtcggctcagcaccgttgctgctgaacacgccctcggggcaggttgcttgcggggccagtaaagcctgggcaaatgcctgctgaatactcatcgggccacctgcgacaaatacccttcggcctgtcgggcctctgcttgcagcacgctgaacgcgggcacctggttatcccgctcgatcagcgtcgccaccgctcccgtccgtgccaatacctgtgcatacagctgccacacggcgttatcgattggcgcaccgtggtcatcgatcagcaggcggtcgcccaggctgtcggtgtcttcggcaaaaccggccagatgaatctcacccactgcgtgcaatggcagggcatcgatgtaggccagcgggtcgcgctggtgattgatacaggacacgtagacgttgttgacgtcgagcagcaggccgcaaccggtacggcggacgatctcgctgatgaagtcggtttcgtccagggtggagcgctggaactgcaaataggtggacgggttttccagtagcatcgggcgcttgagcgtgctttgtacctggtcgacgtgtgcgcatacccgctccagggtgctggcgtcgtaagccaggggcagcaggtcgttgagaaacaccgggccgtggctggaccaggccaggtgttcggaaaaagactggggttggtagcgttcgatcagcgtggccaggcgagccaagtgctcgcggtccagagggccttcgccgccgatggacaggccgacgccgtgcagtgacagggggtattgcgcacgaatcaaccccaggtagtgatgaaacgggccgccggccaccatgtagttttcggcgtgtacttcgaaaaaaccgatgtcggggcgggtctcgagcacctcagtgaagtgctcggtcttgagccccagcccggcccgatagggcaggccgggcgcctgagccggtgagaccgcgtgttgggctgtaagcgtcatcatcagtactcaggctgcgcggggttcaggatttggcggtgaaggccgcttcctggccaaaaccggtcggcgaggtggtgcttggggtctgggtgcatgtgccggcggggaccagtttccaggcattggcctggtctttggttttagaggtgcccgcgcaggaagtaccggcgcctgcggcgcaatcattcttgccggcttcagccacgccgtagcacttctgcatgtcgtcggccgcgtgggcggtggtggtcagggcggacaggctcagggcagaaccaagggccagaacgagggtggcagcggacagtttggtggtcatggtgtgtctccagcagtggttgaatgcgcaggcttgattgcctgcatgcaccactagagagagctcgacgaattgcgttacacaaacttcgaaaataaattcaatagtacggttcacaccaaacaaatgtgggagcgggcttgctcgcgaatgcagtgtgtcagccaacagtttcctggctgattcaccgcattcgcgagcaagcccgctcccacatttttgatccggtttctatggcagcctgtgtttagccgcccaggtacgcctcccgcactttcggatcggtcagcaattgctcaccggtgccctgcatcaccactcggccattctccagcacataggcgcggtcagcgattttcagcgcctggttggcgttctgctctaccaaaaacaccgtcaccccgtccttgcgcagctgttcgatgatgtcgaagatctgctggatgatgatcggtgccaggcccagggaaggctcgtccagcagcaacagctttggcttgctcatcagcgcccggccgatggcgagcatttgctgctcgccgccggacatggtgccgccgcgctggctgaaacgctccttgaggcgggggaacaggtgcagcaccttgtccatctgctcctggtaatcgcccttgtcggtaaagaacccacccatggccaggttctcttcgacggtcaggcgcgagaacactcgacggccttcgggcaccaccgcaatgctcttgcgcatgatctctgccgagtgcttgcccaccagttcttcacccatgtagcggatgctgccactgtaggcttgcggcgaaccgcacaaggtcatcagcaaggtcgatttgccggcaccgttggcgccgatcagggtgacgatctcaccctggcgtacttccacattgacgctgtgcagggcctggatcttgccgtagaaagtggaaacgttttcgaattgcagcattttacgcttcccccaaataggctttgatcacttcaggattgtcgcggatctgctccggcgtcccgttggccagcggcgtgccctggttgatcaccacgatgtggtcggagatgctcatgaccagtttcatgtcgtgttcgatcaacagcaccgtggcgttgttttcctcacgcagcacactgatcagcgccttgaggtcttcggtttccttggggttcaggccggcggcaggttcgtcgagcatcaggatgcgcgggcgggtcatcatgcaacgggcgatttccaggcgccgttgctggccgtaggcgagggtgccggcggggcggttggcgaactcggtcaggttgaccttgtccagccagtacgccgcgtattccatggcctcgcgctcgcttttgcggaacgccggggtcttgaacaggccggcgaagaagttggtgttcaagtgacggtgctgggcgatcaacaggttctcgactgccgtcatgtccttgaacaaccgcacgttctggaaggtccgcaccacgcctttgcgggcgatttcgtggccggccaggccctggatcggttggccgtccagcaggatgctgccaccgctcggcttgtagaaaccggtgaggcagttgaacaccgtggtcttgccggcgccgttggggccgatcagtgctaccacttgtttctctttgacggtcagggccacgccattgaccgccagcaaaccgccgaagcgcatgctcaggttttcgactttcaggatctcgcggctcatttgcgcagctccatgtgtggacgttgcatgggcagcaggccttgaggacgccagatcatcatcagcaccatcatggcgccgaacatcaacatgcggtattcgctgaactcacgcatcatttccggcagcaggatcatcacgatggccgcgaggatcacgcccagttgcgagcccatgccacccaataccacgatggcgagaatgatcgccgactcgataaaggtgaacgattccggcgtcaccaggccttggcgagcggcgaagaagctgccggcaaaacctgcgaacgcagcgcccagggtgaatgcggaaagcttgatgatggtcgggttcaggcccagggcgcggcaggcgatttcatcttcgcgcaacgcttcccacgcgcgcccgatgggcatgcgcagcaggcggttgatcacgaacagggccgccaatgccagcaacagcgcgaccaggtacaggaacaccactttgctcaccgggttgtaggcaatcccgaagtactcgtggaaggtctgcatgccttcggcggcgctgcggtcgaacgacagcccgaagaatgtcggcttggggatgctgctgatgccgttggggccaccggtgatgtcggtaaggttacgcaggaacaggcgaatgatttcgccgaagcccagggtcacgatggccaggtagtcaccgcgcaggcgcagcaccgggaagcccagcaggaagccgaacgtcgccgccgccataccggccagtggcaggcagatccagaagctccagcccaggtaatgcgagagcagcgcgtaggtgtaggcacccacggcgtaaaagcccacataacccaggtcgagcaggcccgccaggcccaccacgatgttcaggcccaggcccagcaacacgtagatcaggatcagcgtggcaatgtcgaccgcgccgcgcgagccgaagaacggccagatcagcgccgcgatgatcagcccgatgatgatgtagcgctgggtgcgcggcagggtcagaaattggctgaccttgggcgacaccaacgggccacggttgcccttgaacagggctccaacctgctgggtgaacagtacacgcaggaacatcagcaccgaacacagcgcgatgacggtcagggtgacaggcccggtgccatgcacttcaaggttgatgccgacaatgctcagcttgagaccgagtaccggaaaggccacggcccagaccagcaaggcgctgaaaaacgccgatttaagatatctgctcatactttctcaacctccggacggcccaggatgccggtcggacggaacaacagcaccagaaccaacaggccgaacgcgacgacgtccttgtactggtcaccgaagatatcggcgccaaaggcttcggccacacccagcaccagcccgccgagcatggcgcccggaatgctgccgatgccgcccaataccgccgcggtaaaggccttgaggcccaccaggaagccggcgttggggttgatcacgccgtattgcatgctcagcaacacggccgccacggccgccagcgcagcaccaatgacgaaggtcagggcgatgatgttgttggtgttgatgcccagcaggttggccatcttgatgtcttcggcacaggcccggcaggcgcgccccagacgggagcgggagatgaacagcgtcaggcccagcatggccaccagggtgaccacgaaaaccagaatctgcatgtacgaaatcagcacttcttgtgcgccacccgggccgaaggagatgctccccggaatcaggttgggaatggacttgtccttggagtcctgggacagcaatacggtgttctgcaggaaaatcgacatgccgatggcagaaatcagcgggatcaaacggttgctgccccgcaggggacggtaggcaacccgctcgatgctgtagccataggcactggtcacgatgatcgatgccaaaaacgcagcggtcatcaacagcggcagggagtggatccccatcatggccagcccggcaagggcgatgaaggccacgtaggaaccaatcatgtacacctcgccatgggcgaagttgatcattccaatgatgccgtaaaccattgtgtagccaatggctatcaaggcataggtgctgccaatggtcaggccattaaccagctgttggaaaaaatgatagatctcaggcattacagcgctcctaaaaacccgatacgcatttcactggtggagtcatttccggctcggtgccctgttctgtgaccaggttgcacaaagcgtttgccagcgaaccgctggtgacggttttaagattttcaggtgagccagcgcccggatcgcgggtgacatggcccataaacctcgtaaaacaaagcccactgcttgcacagtgggcttgttgaccagtaacgcctggcttactgaggggaaacttcggtttttggtttaccgaagtgccattcgtagaccacgaacttgaagtccttcaggtcgcccttggcgtcgaagctcaggtcgcccgtaggggtcttgaaggtaccggcgtggatggcctcggccactttggcggtgtcttcgcttttggccgcagcaataccaccggcaatcacttcaactgccgagtaggccgggaacacgaacggaccggttgggtcctgcttgttcttggcgaactcttcaacgatggctttgttggcagggtcggtgtcgaaggatttcggcagggtcaccagcaggccttcggaagcgccttgggcgatttgcgagatggagtcgttacccacgccttccgggcccatgaacttggcgttcaggcctttttccttggcttggcgcaggatcaggcccagctcagggtggtagccgccgtagtagacgaagtcgacattggcttgcttgagtttctggatgatcgaggagaagtctttgtcaccggcgttcaggccttcgaagacggcaaccttggtgcctttttcttcaagggtcttcttcacggcgctggcgataccttcaccgtattgctgcttgtcgtgcaggacggcgacgattttcggcttcacgtggtcggcgatgtagttgccggctgccgggccttgtgcgctgtccagaccaatggtgcggaagatcagcttgtagccacgggaagtgatttcagggctggtggcagccggggtaatcatgatgacgccttcgtcttcataaatatccgacgctggctgagtggagctggagcagaggtggccgacgacgaacttgacgccatcattgaccactttgttggcaacggccacagcttgttttggatcgcaagcgtcgtcgtattccttggcttcaagcatcttgccgtctacgccgcccttggcgttgatgtctttgatggcttgcttggcacccatgaattgcatgtcgccgtattgcgtcaccggaccggtcttgggaccggcgatgccgatcttgatggtgtcggctgcgaacgaatggccggcaaccccagccaggaccatagcggcaaacagtttggaaatctgcttagtagccttattcatagtgctccactcttactgttgtattttttatagttctagcggccttgtgagctgcagaaccggatcagatatcgcggatatccccccggcattgccctggcaactgtaccggtacagtgtagagcgctggctgatcgcttgaaaagctggcagctgggggcaaaacctgggtatgtcgcttaaatgaaagaaaaagacagaatcgcggcgggttgctaacagctttcaaggcattccttggctttcctggcgctttcaatcgctacttcatttgctactgggtttttctgcctgagcgacggggctatgattgcgccgattttttactcaggtgaattcccatgacgcaagaaccaagcaccctctatgccaagctgctcggtgaaacagccgaaatttcctggaaggagcttgaaccgttctttgccaagggtgccctattgtgggtcgatgccagcctggatttgatcgaggccgccgaaggaatggccgaagacaaccgtgacaaagtcgccgcctggctagctgccgggagtcttggcgaagtgtctgcatcgcgggcgttggacctggtggaacgtgatccgagcttgtgggcagtggtggtctcgccatggattctgatccaggaaagggcggcgtaagaattgccagcactaaaaaggtgcgtatttttcacgcggtgaagtgtgtaggggagtaaccgcttatcgcgtgatggcaccttgccgtagcgaaagatcacaggcgagggtgacgtaaacgtcacgggcacagttcaggtcgtcgggaaatagccgcgcaattgtttcggcgtatgactcagcgctgcagcgcgcgcattcaaatcgtcagcttgcgcgtcttggtctcagcggatcggcctgacaatagaaggcgggccgatacgtcccgcagctgggtcgtttggcggtggagcgtctttgccttccacgctgagcggatatagcggattacgcatggcaatcccctgcatcacgccgatgatgtcgtcgaagggcaccgccgggctgagcaggtagccctggatgtagtcgcagccatgcttgagcagcagctcgaactgcgcctgggtttccacgccttcggtgaccacctgcaaatgcagggtgtgggccatgccaataatcgcttggacaatttcgctgtctgcggtggatttggggatgtcctggataaacgagcggtcgatcttcaaggtgttgagcggcaagcgcttgaggtaagccagcgacgaatagccggtgccgaagtcatcgatggccagtgacacacccagggcgcgaatctgccgcaacagggccagggtgctgctgatattgcccatcaacgcgttttcagtgacttccagttccaggcggttggtgccgatgccggcgaagcgcagggcgtcttcgatttcatcggccagttcgtcacgcgccaggttcaacgccgagcagttcaccgccatgatcaactcggtgtagccccggtcagacaacaggctcaggtcgtgacaggcctggcgcaatacccagtggtccagctcggcgatcagcccgttgttctcggcaatgccgataaagcggtccggggccagcagcccgtgttgggggtgttgccagcgcaccagggcttccaggcgcgtgaccttgcccagcttcatgtcgaagatcggttgataaaacagcaccaactggctgcgcgtacgtaaggcggcgcgcagttcttcttccagttgcagctcaagaaaggcacgggttttaaggttggaactgaagaagttcaagcaattgcgcccggcatccttggattggtacagcgccaggtcggcggttttaagcagttcttcgcaggtgtggccgtcttcgggaaacaggctgatgccgatgctggtggtcatcaccatgcgccgaccggccagttcgatgggttctttcatcttctgcatgatgcgctgggccatgtgccgggcttcgtcgcggtgatgaatattgaccaggatgcagaactcatcgccgccaaagcgtgccaccacatcttcatggctgcgtatcgaacctttgatatgcccggcgagcaccgtgagcagctggtcgcccgcatcatggcccaggctgtcattgatacgcttgaagtggtcgatatcgaggaagatcaccgccatcatgccctgagtgcgggttttttccgcgactttctccgcgaagatctgattgaaaccacggcggttgagcaggctggtcaacgcgtcgaagtgggccacttgttgcagcgaggcgcgggcctggtcgagttcgctgagcagcgcgttgacccggcgcaggtcgcgctccttgtgttgcagcttcttgtcggccagggctgcgctgacgctgctgccgatcaccagcaaggtgatcatcgcgactgagaggcccagttgaatcgggttgtcatcggcccgcaacgacagatccgtgccgctgggcaccagcatttgcatggccgccatgccggtgaagtgcatgctcaggatcccggcgccgagcaccaggctggcggcgtatttgagcagttggtgaaacacgccggccccattgcgcaggtaactggacagcaacaacgccgccaggctggcgcccatggcaatcgccaccgaggccaaaaacagccgcgtttcgaagtacacctgggcttgggaacgcatggccgacatgcccacgtagtgcatcagcgcgatacccagccccatccacaccgaagccaccaggtactgatgaaaacgcaggtgggtatgactgagggtctgcatggcgagcagcgaggcgatcagggcaatcagcagcgagacgaacgtcatgatcagttcgtagtgaatggcaatgggcgcttggaaggccagcatgctgatgaagtgggtcgaccagatgccgcctgccaggcaacccgcacccagccagcgccaatggcggcgggcggtggggtcttcgacatggccgacacgttcggccatgtccagggtaccgaaacccgccgcgcaggcgaccaggtacgccagcagcaccagaaacgggttatgagtgcaattgagcaataaatgcccgctgtctggaaggtcggtaaaaaaatgctgccccagccattccatagcttatcccgtcacagagccctgtcactgccagcggcgatgacccatgaggtcgagtataggagtctctcgaaatttgccatcagtaatggcgttttgatctcaaattattttgatatgccttccatagcgtttggtgctaagcgctgatgggcaggtcgagttcgaagtgcggggcctccagcggggccaggccaaatgcggcacgggcggcgtcgcaatcgacattttgcacgccctggctccaagacgcctcgaactcacggcatacactggagcgttgttcataaattgagcaactggtggcttgtccgacttcaccttcaaggctgcagcaccgtgccggcttgcggtcggtgccgatcatcgccacgcggctggggttgatctgcaccaccagctcatcgggcaccgtgcctccggacgaggcgcactcaccccaaaagaaagacacgcgaaagtgtgaacagcaggcaccgcaattcagacacggactggcttcggacatgggcgtcatcaataagaaaagtaggaggagggtgctgcgaaaggctcgccattctatccgtgccatggccgttgggaagaggggtacgcacttatattttcgtgggcaaaatcccctgttgcctgggtgaaatcatgccctatcagctttacgaatcattacagacaatcaccgccagcctgactatgttgcagtgacctgagcaggatgcaccgggcatcgcagctctcataacaataaaagagacggacccatgcagaactcgacccaagcggcgaatgcctggcgcattctgttcctgctgttcctcgccaacctgttcaatttctttgaccgtaccattcccgcgatcatcatcgagcccatccgcatggaatggcacttgagcgactttcagctcggtatcatcggcaccgcctttaccatcgtctacgccattgccgggctgccgctggggcgcctggccgacaccggttcacgcagcaagttgatgggctggggcctgtttgcctggagcgggctgacggcggtcaatggcatggtcggcagtttctggaccttcctgctggtgcgcatgggcattggcattggcgaagccagctatgcaccggcggccaattcgctgattggcgacctgtttcccgcccaccgccgcgcccgagccatggggattttcatgcttggcctgccgttgggcctgttgctggcgttctttacgatcggtgcgatggtcaaggcgttcgacagctggcgcgcgcccttctttatcgcggcggtgccggggctgatcctggcggtgtttatgttctacataaaagaacccaagcgcggcgcggcggaaaccgtgcaggtttcccaggagcgcgtcgaccgcccgatccgccgcgtgctggccgtgccgaccttcctgtggctggtgctggccgggttgtgctttaacttcgctacctatgcgtgcaactcattcctggtgccgatgctgcaacgctatttccttatgccgttgcaggacgcggccgtcgcgaccggcgtcatcgtcggcctgaccggcctggtgggattgacgctgggcggctggattgccgacaagattcatcagcgtgtcgccaatggccggttgttgtttgccgcgttcagcttgatcatctccacggttaccaccgcctgggcattgcatgccgggcgtgtcgaaatcggggtgtttgtcgcgctgttcagtgtgggctggttgtttgcctacaacttctatacctgcgtgtataccgcgatccaggacgtggtagaaccgcgtttgcgcgcgacggcgatggcgctgttttttgccgggctgtatttgctcggcggtggcatggggccggtggtggtcggggcgctgtccgatcactttgctcattcggcgatgtatgcggacggggcgcagcagatgaccgaggcttataaagccgtgggcttgcatgacgccatgtacctgattccggtggcgctgttcttgaccatgctgtttctgttccaggcctcgcgcagttttgtgcgcgatgccaagcggatgaaggaagggttgagtgcggttgagatgccggcaactgcggtaacggcgtgagaccgagtgatcgttcccatgctctgcgtgggaacgccgctctggacgctctgcgtccgctttaaagtcgtgacgcagagcgtcacatgatgcattcccacacagagcgtgggaacgatctctaaaaaggcccgcactaagcgggccttttacgttcagcggtttatcaacctgccaccagcacccgaatcgcttccagtcgcaacgccgctttatcaagcatggccaggccttgctcgcgttggttgcgcagggcaaccagctcgctgtcgcgcacggtcgggttgaccgcttgcaacgcggtcaggcgcgccagctcttcgtcggtgtctgccgcgaggcgacgcttggcttcggccacgcgttcggcgtgacgtggggcgatcttctcttcgccggcgttgatgcgcggtgtgagttggtcccgctgcgcctgcacgaatttgttcgcgctggcccgtggcacgctttccagctggtcattcaaggtcacgaacgacacgcggcccgacaggtcattgccgttggcatccagtaggcagcgcaaggcggccggcggtaggtagcggcccagttgcagggagcgcggggcgaccacttcgctgacatacagcagttcaagcaatacggtgcctggcttgagcgccttgttcttgatcagcgccacggcggtgttgcccatggaaccggacagcaccaggtccatgccgccttgcaccatcgggtgctcccaggtgatgaattgcatgtcttcgcgcgacagcgcctggttacggtcgtaggtgatggtcacaccttcgtcgtcgcccagggggaagctggcgtcgagcattttttcgctgggcttgaggatcagcgcgttttccgaatggtcttcgctgtcgatgccgaacgcgtcgaacagggtttccatgtagatcggcagggcgaactggtcgtcttgttcgaggatgtcctcgaccagcgcatcgccttcgccggcgccgccggagttgagttccagcaagcggtcgcgaccggtgtgcaactcctgctccaggcgctcgcgctcggcacgggcttcgtcgatcagggcttgccactcgctgtcgtcggcagcttccagcaagggcagcaggcgtgggccgaactgatgctgcaaggcgttgccggtcgggcaggtgttgaggaaggcattgagcgcttcgtggtaccactggaacaggcgctcttgcgggctggtttccaggtagggcacgtgcagttcgatcacgtgtttctggccgatccggtccagacgcccgatgcgctgttccagcaggtcggggtgggacggcaggtcgaacagcaccaggtgatgggaaaactggaagttgcggccttcactgccgatttccgagcagatcagtacctgggcaccgaactcttcatcggcaaaataagccgccgcgcggtcacgctccaggatgttcatgccctcgtggaacaccgtggccggaatgccggagcgcacgcgcagggcgtcttccaggtccatggcggtttcggcgtgggcgcagatcaccaggaccttggtgcgcttgagcattttcagctggtcgatcagccactcgacccgtgggtcgaagcgccaccagcggttctcttcctcgatgtccggttgcgcctggaagctgacttccgggtacagctcggcgtgttcgcccaggggcagttcgaggtattcgtccgggttcggcagcgggtaggcgtgcagcttgcgctcggggaagccttgcaccgcggcgcgggtgttgcgaaacagcacgcggccggtgccgtggcggtccagcagttcacgcaccaggcgggcactggcttcgctgtcgccatcgttgacggcggtgagcagggcttcaccttcgtcgccgaggaagccttgaatggtcttgtgcgcggtcggcgacaggcggcccttgtccagcagctcctgcacggcttcggccaccgggcgatagttttcgctctcggcgcggaaggcttgcaggtcgtggaagcggttcgggtccagcaggcgcaggcgcgcaaagtggctgtcctggcccaattgttccggggtggcagtcagcagcagcacgccaggaatcacttcggccagctgttcgaccagcgagtattcggcgctggccttgtcttcgtgccacaccaggtggtgggcttcgtcgaccacgagcaagtcccaaccggcggcgaacagcgcgtcctgggccttctcgtcgtccaccagccattccagcgcaacgagtgcaagctgggtgtcttcgaacgggttggtggcatcgctttcgataaagcgctcttcatcgaacagcgcaacctgcaggttgaagcggcggcgcatttccaccagccattggtgctgcaggttttccggaaccaggatcagtacgcggctggcacggcccgagagcagttggcgatggatcaccaggcccgcttcgatggtcttgcccaagcccacttcgtccgccagcaatacgcgtggcgcgatacggtcagcgacttcgcgggcgatgtgcagttggtgggcaatcggttgggcgcgtacgccacccaggccccacagcgaggactgcaactggcggctggtgtgttccagggtgtggtagcgcagcgagaaccacgccagcgggtcaatctgcccggcgaacagacggtcactggccaggcggaactggatgaagttggacagttgggtttccggcagggtgacctgctcgttctgcccattgaggccgtggtagaccagcaggccatcgacgtcgtcgacttcctgtacggtcattttccagccttcgaaatgggtgatggtgtcacccggcgaaaacctcacgcgagtgaggggcgcattccgtagcgcatactggcgcgtgtcgccagtggccggatagagcacggtcaacaagcggccgtcctgtgccagaacggtgcctaaccccagctctgcttcgctgtcactaatccagcgttgccccggttgatactgctgcgccatgctgcctgactcccgccgtgaaaaagccgactatgttaacggaacacggcccggcgcccaagaactctgacaaaaactacgctgtttgtacgggccggcggaaattgaatcgacggatggcgggcacttgagagtgtcgactgagtcacagcttggcacgcgggtgctcaagtcaccctgccacccgccgacagcctgttgatcaggagaataattatcatgctgccacccatgctgcccgtcagcgttgtgccggtcacgtcgcaactcgacccggcacgccagaagccggatattccgccggtggtgcccgttcaagcgggctccaacgagagcacgatcgacctgaaaaaaggcgatgccgagcaatcgacctttctgttgcgcgaagagcagcggcgccagcaggagcagcagaaacgccggcgtgaagccgacgacgacgcgcagcagcatttgccgattcctggcgacttgctcaacgctgacaacaccgtgcccgtggcgccgctgatcgaagacgcgccgcgccagggactgtgggtggatatcgaggtctagcccttcagttcgcgcagggccttcaccagcaactcaatctcgtcatcggtgttgagcgggctgaccgagatgcgcgcaatgctggtcaacccacgcgcttgcatgtccagcggggtgtaggccacgccattggcgccgatgttgatgcgctttgaccccaggcattgtttgagttcaaaactatcccagccggccaggttgaacgcgatcaagcctgaatgcgtgttgcccaagtcgtgcaagctaatccccggtatctgacgcagtgcttcgcggattcgcgcgctggtctgcaagactctttgccatacccgctcaattcccagttgattgatctcgtgcaacgcgttgcccaggccggccagcagggcgaaggacacttcgctggtttcaaagcgtcgcgcgtcgttgcgcaggtcgaagccttcggcggtccagggcgctgaaaacacgtcgcgttgggccgggttcaggtgctggaggaactccggccggatgtacagcagtgcggtaccgcgaggcccgcgcagatgtttgcggccggcagacttgagcacatcgcactgcaacgcttgcacatccaccggcagttggccgacggcctggcccgcgtcgatgaagtagggaatggcatgccgcctggccacatcgccgatggcctgggccgggttgatcaaccccccgttggccggcagccaggtgaggtcgatcagcttcaccttggcatcgagcattgcctccagtgccaccgggcaggcggcgccgctggcatcgcacgggatgacctccacccgcgccccggcttgaacggccagttccatgctcgccaggttaccgccccattcatggcgccccactagaattcgatcgcccggctgccacggccccagcgcctggaaggccatgctccaggccgtggagccactgctggcgaaggcaatcgacgaagcgggcgcattgagcagttgcccggcggctcggcgggccttttccactaagacggcaccttgttcgccggcctccatcgggccgtcgcgcgcttcgcgttgcagctggtcgatgatggcgtcgagcgtcgcctggctgggcaaggatgccccggcgtggttgaagtgcacgatgccggattggcaaccgggcgtggcctctcgcaagtgctgcacttgcagcgggctcatggctgcagctcgaaaatggcatctacctccacggcgacgccagccggcaaactgcagacccctacggcagtgcgcacgtgtcgacccttgtcgccgagggcgttgaccagcaggttcgaggcgccattggcgaccacgctctggcgctggaaatcggcgctgctggcaatgaacacacccagacgcaggacgcgcaccacccgcgacaggtcatcgcccagcgcatcgcttaattgccccagcaggcccagcgccgccagttctgccgcttgggcgccatcttcatcgctgagggagtcacccaggcggccaaggtaggcgggtttgccatcgagcaggggaatttgcccggagatgaacagttgatgctggctgctcacatgattgatgtagttggccgcgggttggctgggcgtgggcagtgtcaggccgagggcgtgtacgcgctggcggatggagtcggtcatggtcaaaccctctggtgtcagaaggttccagcatgttggcggtggcgaggggcgacaaacggatagatctcactcgacgtatcgaaaaaactcacgcgtcggcgcacgcttgttttaaccactggctgaagcattcagccgcctcactgagcggcccctggggggcgatcagccaatagccgatgtcgctgtgatagggcggccagtcaaaagcctccaccaggctgccgtcctggagcctgcgttcgatcaggcgatggcggcccatggcgattccctggccggccacgcttgcttcgaccacgatgttgtagtcatgcagcatcacgcgggggtggtgatcgaggttgacctggtaatgggcggaccaatcggtccactcgaaaggacggtgcgaggtcgccatcaacaacgcgccactggcgacctgccgggctttgaatgcagggctgcatacgggtgacagggtttcggccatcaggcgcgtggcgtgcacatcgggccagtcgcccttgccgtagcggatggcaaggtcaacctcggccgtggcgacgttggccaattgaatcgcgggcagcaactccacctggatatgcgggtagcgctgtagaaactcggccaggcgcggcgccagccacagcgtggcaaaggacgccagcaagccgatacgcaacacattggcgctgggcgcaccccgttggttacgggtcgctgcggcgatggcgtccagggcagggcggatctgctcgtagtacgcttgccccgccaacgtcaggtcaatcgcacgggtacgccggataaacagcggcttgcccaagtggtgttcaagcttatgcacctggtggcttagggcactttgggtcaccgacaactcgttggccgccttgataaaactcaagtggcgcgccacggcttcgaaggcgcgcagggccaacagtggcggaaggtcgttgtgcaaggccacctggatgcgcctcctgggcagggtagaaagcgctgattctggtcgatggcctgcattttgtcgcccgcttaattgccgtcgggcggggcaggccgcattattgaggcattcccgccacgacgtaagccaagccatgagtgatgacgacaagctgatcgacctgaacgccgaacgcgccaagcgcgtgcacgacctcaatgacaaacgcttgaatgaagtgcgccaagcctttgaacaagccatgcctctgggcaagcccaagaaaaagcccaagaacaaaccgaaaaagcgttgaaacaccctgcatccgttgatgcaggtcagttattccccttctttacgcgccgttgtgggcgatattgatcctggtcaattttccaccgcgccttctccattaacttagccctatcgcaacagggcaagtgcaggaggccggtcatgtttttcgataatgtggtttttgccggagtgctgactgttagcctcatggtgttgttttttgtagggtttggattttttatctggaaagacgcgaacaagcgtaaaaaaccttaagtttttccgggttacatgagcacgcaaggcattttgggcgacttcggtcgccctttttttnnnnnnnnnnnnnnnnnnnnnnnnnnnnnnnnnnnnnnnncaagagccctttggttactttgggctgggccggcattccggcttttccaaagtgagccgccgtcagggcggaaccctaagtggccgttaccgcagcaatggatatgtacacggcccaactgtgttgactgtcaggccgccatcgcaggcaagtcagctcccacagtttgactgcggggtgtcaggtaggtatgtgtcggctgtccggtcgccacgggggcaagatgccttgccacaggtggactacggtgcgcttggaacataaaaaaaggtgcgaccctcgcggatcgcaccttttttattgccggctggctatcagttgcccaatgccttggacgccaaccagaacaatccggccgagaggcctacggtcgctggcaaggtcaatacccaagccatcaggatggtcttgaccgtgccaccttgcaggccgctcttgttggcaaccatcgtgcccgccacgccagaagacaggacgtgagtggtggacactggcagggcgaagatattggcaaagccgatcatggtggccgtggtgatttgcgccgacatgccctgggcataggtcatgccttgcttgccgatcttctcaccgatggtcagcaccacgcgcttccagcccaccatggtgcccaggcccagggccagtgcgaccgcgaggatcacccagaacggggcgtactcggtggtggcggtcaggtctttgcgcagcttgtcgaggtcggacttctcacgggagtccaggcctggcagcttgccgactttcttcgcggtgtcatccaggcaaagcaggtaacgacgcacttcgatgcggtggtcggccgtcagcgagtggtagtccgagacgcccttgagggtgcccagcagcgcgttgatcgtcggttcggtctgctgcgggttgcagcggaacttgcccggcaggtcatccttcacgcttttgcccagggccaggaactcaccgagggtctcgtggttgcgctggtagaactggttcaggtgcagggtggcgtcgcgggtacgttcgatctggtaggtggtgctgcccaggtccaatacgaactgcgccggcacgatgccgatgagcaccagcatgatcaggccgatgcctttctggccatcgttggagccgtgcacgaagctcacagccatggccgaaatcaccagcaccaggcggttccagaacggcgggtgctttttgtcgtcaagcttgcggcgctggtccggggtcttgtgcatctttgacagcgggcgccaccacttcaggccgatcagcaccagggcggcgaccaggaagcccgccatcggcgagaacaccagcgacgcgccgatatccacggccttctgccagttcacaccgtcagccagggggatgtcgttgatcaacgcgttggccaggccgacaccgaggatcgagccgatcagggtgtgggaactggaggcggggataccgaagtaccaggtgcccaggttccaggtgattgccgccgccaacaacgagaagaccattgccaagccatggccggtgttcacattgatcagcaactccaccggcagcaagtgcacgatggcgtaggcgacaccgacaccaccgagcaatacgccgaggaaattgaacaccccggagaagaacacggccaagtgtggcggcatggctttggtatagatgactgtggccaccgcgttagcggtgtcatgaaagccattgatgaactcgaaggcgaggacaaaggccagggcgagcaacaggctcacgagaacccaagcatccagtccgctgaataaatcgatcatgaaggttttctgacccggtcgtaagggggcgcgattatgccagaaaacatcagtaatcgatgcattagctgctcatcggtaacaatcttcctggaaaaaaatgcggcaagacgcacgcatccctgggttttcggggctttggcaagtctttgatttataaagcgcaggccccagaagacgggctttcttcatgaaaacgccatgcctgaaacatttgtatgaaatttcgtaggtggatgtaggttgctgaccagcggacgctaaagcaggtgccctctgccagtactgcaccggcagagacagcacgactcttgaagctcgaaccgaagcgcttatggctcctcggtcttgagttcctgctcgatcttttggatttcctgggcaaatgcctggtctagcaggctggcacgtttacgccatggcttgcgttccggctcgggttgcgcggcgtaggtggtgacttccccgccgtagacatccttgtaacgttgctcctggcgctcaagttccgcgcgcagttcatctttcgtcacagtattacctaattgaattgagtttattgattgcgcagcgtcatgcctgaaagtcgtgctcgggcgataccaaataaaacaggcgaaccgttcaagttggtacatgggcctgaaggccgttctttcaagcgagtacttgtgaccggcgttgccagcagcctgcaatgcctggtgagctccactcccgatggtgataccgggctgacctctgcacaggttgcattatagcggcgcatttgaataacactatcatcatgaagttaaaaagcgtcaacgacatgtctggagtttgttacataccgccgcgttatttgtgaacaccgtcatcttcatgtctacatttgagttacacgcacatctcatgtgggagcgggcttgctcgcgaaggcggtgcgtcagtcaacatgtatgttgctgggcggacctcttcgcgagcaaccccgctcccacatgagttctgcgttgatttcgcttgattgatcggcattagggtagatgtctacgctttacagaggcatcaggcaaatctgaaacgttagcgggtggggctgcgccaaattgcgataatcgcatgatcgtccgataatcgcccaatgttgccgccgctggcttgtgcggtacggccggcacggcttgtaatagccgccaaccctcccgtggtgataacaagagaaggcccttttaaatgaacgatcaattgcgcaactcctttgcatcagtggcgccgccgatcgtggcttcaccggccaagcgtatccaggcattcaccggtgatccggatttcatgacgtccctggcccgtggcctggccgtggtgcaggcgttccaggagcgcaagcgtcacctgaccatcgcccagatcagccaccgtaccgaaattccccgcgccgccgtgcgccgttgcctgcataccttgatcaagctcggctacgccaccacggacgggcgcacctattcgttgttgcccaaagtgctgaccctcggtcatgcctatctgtcgtccacaccgctggctgtctcggcccagccttatctggaccgcatgagcgagcaactgcatgaagcctgcaacatggcgaccctggagggcgatgacatcctttatatcgcccgttctgccactacccagcgcctgatctcggttgacctttcggtaggcgggcgcttgcctgcgtattgcacgtccatgggccgcattctgctggccgccctcgacgatgcctcgctgcaggattacctcgaccatgccgacctgcaaaccaagaccagccgcactctgaccacgccgcaagcgttatttgaatgcctgcaacaggtgcgtcagcagggctggtgcattgtcgaccaggaattggagcagggcctgcgttccatcgcggtgccggtgtatgacgcgtccggccaggtgttggccgcgctgaatgtcagcacccacgccgggcgggtcagccgcagcgagttggagcagcgctttttgccgagcatgctcagcgccagccgtgagctgagtgcgcaactgtttgcctaacctaagatgttcggtgaccgcacagatcccgactggctcgattgacggtgtttcccttggcttattaatgtgcggcagcgctctgaggagctgccccctataagaatgacgacctcaggttgtcagcccgccatcggtgtggaataaaaataatgaatcagccttctgtcggtaccaccctggacgtacagtcctttatcaacgcccagccactctcgcgctatcagtggcgcgtggtgatcctgtgtttcctgattgtctttctcgacggcctcgacacggccgccatgggctttatcgcgcccgcgctgtcccaggactggggcatcgaccgcgccagcctcggcccggtgatgagcgccgcgttgatcggcatggtgttcggcgcactcggttccggcccgctggccgaccgctttggccgcaaagtcgtgctggtcggcgcggtgttggtgtttggtgcgttcagcctggcgtcggcctacagcaccaatgtcgaccagttgctggtactgcgctttctcaccggcctgggcctgggcgccggcatgccgaatgccaccaccttgctctctgaatacacccccgagcggcataaatccttgttggtgaccagcatgttctgtggcttcaacctgggcatggccggcggtgggtttatttcggccaagctgatccccgcgttcggctggcacagcctgttactgatcggcggcatcctgccgttgatcctcgcggtggtgctgttggtttggctgccggagtcggcgcgttacctggtggtgcgcaatcgcggcactgacaaggtgcgcaagaccctggcccctatcgagccaagcatcgtcgcccaggccactcacttcagcgtgccggagcaaaaaaccgtcaaggcccgcaatgtgttcgcggtgatcttctcgggcacctacagcgctggcaccttgctgttgtggctcacgtacttcatgggcctggtgattgtttacctgctgaccagttggctccccaccttgatgcgtgacagcggcgcgagcatggagcaggccgcgtttatcggcgcgttgttccagtttggtggggtgctgagcgcggtgggcgtgggctgggcgatggaccggttcaacccgcacaaagtgatcggcacgttctatctgctggccggggtgtttgcctacgcggtggggcagagcctgggcaacatcacgctgttggccaccctggtgctggtcgccgggatgtgcgtcaacggtgcgcaatcggcgatgccgtcgctggcggcacgtttctaccccacccagggacgtgccaccggggtgtcgtggatgctcggcatcggccgcttcggcgcgatcctgggggcgtggatgggcgcgaccttgctgggcctgggctggaacttcgagcaggtgctcacggcgctggtgattccggcggcattggccacggcagcggtggtgatcaagggcatggtcagccatgccgatgcaacctgaaaccgatcactatccctgtgggagctggcttgcctgcgatagcggtgctgaattcactcgcgccatcgcaggcaagccagctcccacattgaccctgttctttgcgatggttagttaagcaacaatcggttcgataatcgaacactcagtcgattatcggattgtttggcccattaccccggcttaaccttcaagcacttcggcgccacctcagcgcctttttcgatcaacaccgggagcccaaccccatggctgaaatcctcaccctgcgtgatgcggtcaagcgcttcgtgaacgacggcgataccgtcgccctcgaaggcttcacccacctgatccctacggccgcaggccatgaaatcattcgtcagggcaagaaagacctgacactggtgcgcatgacgcctgacctgatctacgaccagttgatcggtgccggctgtgcacgcaagttgattttctcctggggcggcaacccgggcgtgggttccctgcatcgcctgcgtgacgcggtagagaaacaatggccgcaagcgctggagattgaagagcatagccacgccgacctggccaatgcctacgtcgccggtgcctccggcctgccgttcgcggtgttgcgtgcctacgccggttccgacttgcccaaggtcaacccgctgatcaagaccgtcacctgccccttcaccggcgaagtgctggcggcggtgccatcggtgcgcccggacatcactgtgattcacgcgcagaaagccgaccgcaaaggcaacgtgctgctctggggcattctcggggtgcaaaaggaagcggccctggcggccaagcgctgcatcgtcaccgtcgaggaaatcgtcgacgacctgaatgcgccgatgaacagctgcgtgctgccgacctgggcgctgacggcggtgtgtcatgtacccggtggtgcgcatccttcctatgcgcacggctacaacgagcgggataaccgcttctatcaggcgtgggacccgattgcccgcgaccgtgggacctttaccgcctggatcgacgaatacatccacggcactgccgacttcagtgaattccaggccaagctggccaccgcgcaggaggctaagtaatggcttactccaccaatgaaatgatgaccgtcgccgccgcacgccgcctcaagaacggctccgtgtgcttcgtcggcatcggcctgccatcgaaggccgccaacctggcgcgcctgacatcgtcgccggatgtggtgctgatctacgagtcgggcccgattggggccaagcccagcgtattgccgctgtccatcggtgatggcgagctggcggagaccgctgacactgtggtacccaccggtgagatctttcgctactggctgcagggcgggcgtattgatgtgggttttctcggcgcggcccaggtcgaccgtttcggcaatatcaacaccaccgtggtcggtgattatcaccagcccaaagtgcgtttgccgggtgccggtggcgcgccggaaatcgccggttccgccaagagcgtgctgatcatcctgaagcagtcgtcccgttcgtttgtcgacaaactcgatttcatcacctctgtggggcacggcgaaggtggcgactcgcgcaagcgtctgggcctgcccggcgccggcccggtgggcatcattaccgacctgtgcatcatggaaccggaggagggcagccatgagttcgtggtcactgcgctgcaccccggcgtgacccgcgagcaagtggtcgccgccaccggctgggcgattcgctttgccgaccaggtgagcaccaccgctgagcccaccgagaccgaattgaccgccctgcgtgacctcgaagcgcgcactgcggctgcccacggccaagcaccgggagaagcctgatgcgcgaggtttatatctgtgatgccattcgcacgcctatcggccgtttcggcggtggcctgtccacggtgcgtgccgacgacctggcggcgctgccgatcaaggcgttgattgaacgcaacccgtcggtggactggagcgccgtagacgaagtcttcctcggttgcgccaaccaggccggtgaagacaaccgcaacgtggcacgcatggcgttgctgctggcggggctgccggaaagcattcccggcgtgaccctcaaccgcctgtgcgcctcgggcatggatgccatcggcaccgcctttcgtgcgattgccagcggtgaaatggagctggcgattgccggtggcgtcgaatcgatgtcccgcgctccgtttgtgatgggcaaggccgacgcggcgttttcgcgcaacatgaagttggaagacaccaccattggctggcgttttatcaacccgctgatgaaggcccagtacggcgtggatgccatgccgcagaccgccgataacgtggccgacgactaccaggtttcccgcgccgaccaggacgctttcgccctgcgcagccagcaacgcaccgccgccgcccaggccgccggattctttgccgaggaaatcgtaccggtgcgggtcgcgcataaaaaaggcgaaaccctggtggaacacgatgaacacccacgggacaccacgttggaagccttggccaagctcaagccggtcaacggtgcggacaagaccgtcaccgccggcaatgcctcgggcgtcaacgacggcgccgccgcgttgatcctcgccagcgccgaggccgtcaagcaacacggcctcaccgctcgcgcccgtgtgctgggcatggccagtgccggtgtcgccccgcgggtgatgggcatcggcccggtgccggcggtacgcaagctggtggagcgcctggggttggcggtcaccgattttgacgtgatcgaactcaacgaagcctttgccagccaaggcctggcggtgctgcgcgagctgggtattgcggacgatgcgccccaggtcaaccccaacggtggcgccattgccctcggccatcccctggggatgagtggtgcgcggttggtgctgacggccctgcaccaattggaaaaaaacggcggccgcaaaggcctggcgaccatgtgcgttggcgttggccaaggcctggccctggcgattgaacgcgtctgataactaaaagaggattgctccatgagtgacaagcccggttaccggcgcccgcaagcgggcacccaacctgattacctgcacccggcgtaccagtcgacgaacctgcgttcgccgtctcagccattggtgtttctgccccattccttgtcggaaatcaccggcccgaccatcggcgccgaacgtatcaatgacaaggacaacgacctgacggcccagcatgacggcgagccgcaaggcgagcgcatcatcattcatggccgcgtgctggacgaaaacggcctgccagtgccgggcattcttgtggagatctggcaggccaatgccgccggccgctacaaccacaagcgcgacctgcacgatgcacccctggacccgaatttcaccggcaccgggcgcaccgtcaccgacgccgacggctggtaccagttccagaccatcaagcctggcgcctacccgtggggcaaccaccacaacgcgtggcgcccggcgcatatccacttttcgctgttcggccccagcgtgctgacgcgcttggtgacgcagatgtattttccgggcgatccgttgctggaatacgacccgatctacaactgcgtgccggacaccagcgccaagcaacgcttgatcgccagtttcgacctggaaaaaaccattccttcctatgccctcggctaccgctgggacatcgtcctgcgcggccgcgacgccacgccgatggagaaatgagatgacactcaacgcgaccacgtcccacaccgtcgggccgtattaccacattggcctgacctggctgaaccgtgaagacctgaccgtcactgccaccctcggcgaacgcgtggcaatcaccgggcaagtggtggacggcaacggtgatgtcgtcaacgacgccatgctggaagtctggcaggccaatgccgccggcaaatatgcccaccccgaagacgagcaggacaaagcgctcgacccgaacttcgaaggcttcggccgcgtgccggtggatgcccaagggcgttttcgctttaccaccatcaagcctggcagtgtgccggggctcaagggcaccacccaggcgccgcacttggtggtgctggtgtttgcccgtgggttggtgaagcacttgctgacgcggatttattttgacggtgaggccttgaatggcgatgacccgttgctggcgtgtgtaccggccgaacgtcgtagcaccctgattgccaaggcggatgcggcaggggtgtatcagtggaatgtgattttgcagggcacagataaggaaacggtgttcttcgactattgagttggctgtagggccccatcgcaggcaagccagctcccacctttgaatgtgttcacaacacaaaatgtgggagccgggcttgcccgcgatgaggccctctcacgctccacctatccaaaagtctgcttgcggaacagggttgttgcaaagtatgtctaggctataaccgttcccactgagtaaaaaaacatgacaacaaaaaccagccactacaccggagaagaacgcagcaaacggatctttgcgattgtcggtgcttcctccggcaacctggtcgaatggttcgacttctacgtctatgccttctgcgcgatttatttcgccccggcgtttttcccctcggatgaccctacggtgcagttgctcaacaccgccggtgtgtttgccgccgggttcctgatgcgtccgattggcggctggttgtttggccgggtggccgacaagcacgggcgcaagaattcgatgatgatttcggtgctgatgatgtgcggcggctccctggtcatcgccttcctgcccacctataacgacatcggtgcctgggccccggcgttgctgttggtggcgcggctgttccagggcttgtcggtgggcggcgagtacggcaccacggccacctacatgagtgaagtcgcgctcaagggccagcgtggcttcttcgcctcgttccagtacgtgaccctgatcggcggccagttgctggcggtgctcgtggtggtgatcctgcaacagatcctcaccgaagaagaactgcgcgcctggggctggcgcatcccgtttgtgatcggcgccattgccgccgtgatctccctgctgctgcgtcgcaccctgaaagaaaccaccagcaaggaaatgcgcgaagacaaggacgccggcagtatcgtcgcgctgtttcgcgaccacggcaaagccttcatcacggtgctgggctacaccgccggcggctcgctgattttctacaccttcaccacctacatgcagaagtacctggtgaacaccgtgggcatgcacgccaagacctcgagctacatcatgaccggcgcgctgtttctgtacatgtgcatgcagccgttgttcggcatgttggccgacaagatcggccgacgtaattcgatgctctggttcgccggccttggcacgctgtttaccgtgccgatcctgctgaccttgaaaaccgtgaccagcccgtttctggcctttgtgctgatcaccctggccttggcgattgtcagcttctacacctccatcagcggcctggtcaaagcggagatgttcccgccgcaggtgcgtgcattgggcgtgggcctggcgtatgcagtggctaacgcggtgtttggcggttcggcagaagtggttgcgctgagcctcaaatccatcggcatggaaaacaccttttattggtacgtcaccgcgatgatggcggtggccttcctgttcagcttgcgcctgccgaaacaggcggcgtacctgcatcacgatctgtaagggatgagttatgacgttgcgcacgagcaatcaactgttcgacgcttatttcaccgctgacagcatggccgacgtgttctgtgaccagggacgcttgcagggcatgctggatttcgaagccgcactggcccgggcgcaggcccgcgtcgggttgattccccaggccgccgtcgcgccgattgcccaggcgtgcctggcgtcgctgtatgacgtggatgcccttggcagcgcaattgccacggcgggcaactcagcgattccattggtgaaggcgttgggcaagttgatcgccagtgaggacgccgacgccgagcgttatgtgcacctgggcgcaaccagccaagacgtgatggacaccggcctggtgctgcaactgcgccgtggggtggaactgatcgaggccgacctggctcgcctgggggatgtgttggccgcccaggcccagcgttatgccaccgtgcctttagccgggcgcacctggttgcagcacgcgacgccggtcaccctggggatgaaaatcgccggttggctgggcgcggtgacgcgcagtcgccagcgcctggccgaattgaagccgcgcctgctggtgctgcaatttggcggcgcatcaggcacgttggcggcgctcggcgaacacgccatgccggtggccgaagccttggccgccgagttgcaactgggcttgccggaacaaccctggcacacccagcgtgaccgcctggtggagtttgccagcctgctaggcctgatcgccggcagcctcggcaaattgggccgcgatatcagcctgttgatgcagaccgaagcggcggaggtgttcgagccttcggcgccgggcaagggcggttcgtccacgatgccgcacaagcgcaatccagtgggcgccgcggtgctgatcagcgcagccacccgtgtaccgggcctagtggcgacgatgttcagcgccatgccccaagagcacgaacgcagcctgggcttgtggcacgccgaatgggagaccttgccggagatttgccgcctggtgtccggtgccttgcaccaggcaattctggtcagtgaagggttggaagtgaatgccgaacgcatggcacagaacctcgacctgacccagggcctggtgctagccgaagcggtgagtatcgtgctcgcccaacgcttgggccgcgacaccgcgcaccatctgctggaacagtgctgcaaacgtgcggtcgccgagcagcgccatttgcgcgcggtgctggcggatgagccgcacgtcaccgccgagttgtcagcggctgaactggaccgcctgctcgacccggcccactacctgggccaggcgtccacctgggttacgcgtgcagtgaccgaacattttgctttgactgcctgaggagaacgctgtggcttttgtacaactcgccgagggcgaactgcattaccaactcgaggggcccgccgacgcaccggtattggtgctgtccaattccctgggtaccgacctgcatatgtgggatatccagattccggccttcaccgagcattttcgcgtactgcgcttcgacacccgcggccacggccaatccctggtgaccgaggggccttacagcattgagcaactgggccaagacgtgatcgcactgctggatgcgctggagatccagaaggcgcatttttgcggattgtccatgggcggcttgatcggccaatggctgggcatccatgccggcgagcgtctgcaacgcctggtggtgtgtaacaccgcggccaagatcggtacgcccgaggtatggaacccgcgtatcgaaatggtcctgcgtgatggcgcagccgcgatggtagcgctgcgcgatgcgtcgattgcgcgctggttcaccgcagatttcgccgccgcccacccgcaccaggccaagcagatcactgacatgctcgcggccacgtcgcccgagggttatgccgccaactgcggcgctgtgcgcgatgcggattttcgtgagcaattgttctcgatcaaggtgccgaccctggtgattgccggcaccgaagacgcagtgacgccgccagccggtggccactttatccagagccatgtgcagggtgccgagtatgccgagttctatgcggcgcacctgtccaacgttcaggccggtgctgcgttcagcgaccgggtgatcgaatttctgctggcccgctgaggagctatttgtggacgagaaacaacgttacgccgagggcctgcaggtgcgccgcgaagtactgggcgatgcccacgtcgaccgcagcctcaatgccctgaccgagttcaacagcgagttccaggaaatgatcacccgccacgcctggggtgacatctggacccgccccggcctgcctcggcatacccgcagcctgatcaccatcgcgatgctgatcggcatgaaccgcagtgaagaactgaaactgcacctgcgtgctgccgccagcaacggcgtgacccgcgccgagatcaaggaagtgctgatgcagagtgcgatctactgcgggatcccggcggcgaatgcgacgtttcacctggcggagtcagtgtgggatgagttgggtgtggagtctcgccaacaagactgaatatgaaatgcgatctcctgtgggagctggcttgcctgcgattgcggtgggccagtcaatattgggctgactgacagattgctatcgcaggcaagccagctcccacaggggatcgtcacaggttcagggcgttagtgggaatcagcatcccacagccaattccacacccccggcagatgcaccggctcgttcacaaccttgaccgtacgtgccagcgctgcacgttccagcgcggcgtggtcggtatagaacggctctgccgctgtcttcaatccgttgacccgcgcgctgtccatcaggatctgcaagtactcctgcatatgccgcgcggtgtagcggttgatgtcatggaaggtcaccactaccggaatcaccccctccactgtcggtagttcacccaaggcgatgcgttcgcgcaccaccgacagttgccgatacagattggcgcgccgacgcgggctggcgttgaagccccagatcttgccgtcattggcactcaagtccgtcaacagtacccgcatgccgtggcgttggtaggcggcgaaggtgcgcttgtcgtagttccagaagggcgggcgtaccagcacaggtggcgcgcccgtgatggcggcaatatccgcagcaccttcggtcagggtgtgttccagcgtggcgtcgttcaaccagcggtgattggtgtgaaacgccgtggcggtgtgaaaggctaatacatggtcagcggcgaactcacgttccatggtcttgcgcccccgagaactgccgccggagcgagcggcttcggtctgcaggaaaaacaccgccttgatccccggcagtaccgggttattggccaggtcggccactaccgagcggctcgggttgttgtagcctgaggcacttgggccatcgtcgaaggtcagcagaaagcggatcggcgcctgggtttgcaggcgttgctcggtctgtggcgtcagggcgaggggcgggccgatgcagccgctgaggctcaacgccagggccattgcgatggcgaagggtttcatggtgtgcacgggctcgaatagtggccgctgcagggcgaatctgcagcggcaggctcgcacgatacagcaagatcaacgttctggggctatgccttgatacaggtcacctccagattgattgctgcatcggctcatggcggtgtgtccgtgtccgccgttaggtatcagtagcctgttcgcggtggtttgcccatttccaaattcagcgcattttcggtaaacggcgccgggttggtggaggtgggcggggtggatgggtcgttgtcgaagtcgaagggcggtgcgttagtcggcaggccgattgcctgcagctcagaattttccggtccagggcgctcagggagctctggaagtgggtcgctggagccgcttaggaacgtaccgttggcgccgttccaggcatgtgccatctcgtggtagaactgggcgatcggtgatgcgtttgtcttccgattggactcgctcggatagtaaaaaatcataccctggccagcagcggcaccggctactccgtcgtttatcacacccattttcgagtcgtcgtgtgggattttcaactgttcgctgcgcgtgagttttccagctcagtggtattgaacccatacatgttaatgaaatcggattgcatgatagtgaccggcgcaccgtttctatcagcggctttgtccatctcctccagcatgactctccccgcaggcgaggagcggagtaactcaagatcatcttcgacccgttctttgaacacatccgagcctacgatgctaaacgctcgctgaccggcatcggtcggcgtcacccgggtgatggtcgattgttccgtatctgaaagacggtcaccgtttttgacgtagatgcgcgctgcgttaccgttggcccacaccctgtcgaaccctttgcccgtgtagatagtcgcttcgtcgtgggcgactatccggtcattgcctttgccgccatttatcaccgtatgtccgttgctggcgtagagtctgtcgttgccatcaccgccatccaagtaactttttttagtcgtcgggccagcccccgcatacaaaacgtccttgccctggttaccgtacatcaccccgtttcctgtaacgccgatcaaggtgtcgttaccctcgttgccttcggcataaccggcgccactgcccaatcggatatggtctctgcgacgtcccccataaacggtggtcgtgccgctgctggcatgaaccgtgtcattgccatcgcccgcgtggatcgtgaccgcggcggtgacagtggggtccagcgtgatgttgtcgttgcccccagcggtcaaggtgttcaggcttaagaacggcactggcgtgtctttggcgggcgaagtgtgtgaggtggggggcggattgttgagcgtgtaagtctgatcattcaccgacacgctcagccggcggtcggcgtgctggctgatatggataacgtccgaagcgtcacccgtttccagcgtcagaatagtggcagtgtgttgcgggttattggggtctctgtaggaggttcgaatttcctgggtaaccttcaggttgccgttctccaccagcacctctgtattggatcgcaggtagctgctgccagtggcaggaggagggggcgcctccggtgagatgggcggtgtaatgacgggtagggcgatgggggacgctgagttcattgaacgttacctgctcgtttgacgtgggttagtgttcccggccctacgtgtcgccaaggccaagacatccatcagtcgtacgccctgagtgaattgaagaactgaaactgcacctgcgtgctgccgccagcaacggcgtgacccgcgctgagatcaaggaagtgctgatgcagagtgcgatctactgcgggatcccggcagcgaatgcgacgtttcacctggcggagtcagtgtgggatgaattgggtgtggagtcccgccaacaagactgaatatgaaatgcgatctcctgtgggagctggcttgcctgcgattgcggtgggccagtcaatattgggctgactgacagattgctatcgcaggcaagccagctcccacaggggatcgtcacaggttcagggcgttagtgggaatcagcatcccacagccaattccacacccccggcagatgcaccggctcgttcacagccttgaccgtacgggccagcgctgcacgttccagcgcggtgtagcggttgatgtcatggaaggtcaccaccaccgtttacgtcaactttcttgtgtcagtattgcattcgcggtgggagtcccatttcctcgcgcaacgcattctcggtgaatggggccgggttcgtggacgtcggcggggtggtgggatcgttgtcgaagtcgaagggtggggcgttagtcggcaagccgacagcctgcggttcgccattggcagggcctggactcatagggtcaccggctgtgcctggcagaaaagtaccgttggcaccgttccaggcgtgtaccatttcatggtagaacgcgacaattggagaggtgatgttctcgttttcaaaggccaagattgagttctgcgcatagttaattgtgccttgatccgcacgggcgccaggctccccatcttttattccacccctcttcgggtcgcccatagggatctttttccgctcttgctcgcttaatttttgcagctcactgctgttgaacgtgtaactggaaccaccttttttgtcttcttcgatggtgactggagcaccatttcgctcagccgctttatccatttcctccagcattttgcgccccacaggtgaggcacgcagcagtgccaggtcatcttcgacccgttgtttgaactcatccgtacctacgattttaaaagcttttttacccgcttcgctcggctccgttctagtgatagtcgattgctctgtgcctggcaggtaatcactgctctgggcataaatacgcgctttggtaaggttgccccaaacggtatcggatcccttccccgtgtacgcggtggtattggcgtaagcaactatttggtcattaccgtcgccgccattgatcaccgtatgcccgtcgccagcgtataacaggtcgtcgccctcacccccatccaggtggctttttttgttggcgggtccaggccctgcatacaaacgatcgttacccttgttcccgtacatcacggagtgtcccgaaccgccaattatcgtgtcgtcaccgtcgttaccttctacgtagccgccgcctttacccaagcgaatagtgtcgttcccgcgtccgccataaatgtcgggattccccccttcggtttgaacggtgtcatctccgtcacccgcttcgatctttacgtcgacagtgacgtcaggggccagggtgatgttgtcgttgcctgcgccgctcttaatgtgcaggctgaattgaggttgtatgccttccgatgatgaactgtttggcgaggggttattgccgttgaaggtgtattcctgctcatttacctttacacgcagtgagccgttcgggtcctgactaatatggatgacgtccgatttatcactcgtttcgagtgtcaggatattgcccatgagcactggcttcttggggtctccatggtgttcgatggcctcctcactcgctttaagattaccgtcatccacgagcatctgtgtctttcggcgaatgaggtcgtcgccgggaggtggagtgttgtctgcaagtgcggaaggcgcagttacggggggagcagtttgcggggctatcgtagtcatggaagatcacctcttgagctaaatagggtggcttgcccagtccttcgttgtattgaaggcaaggagatcaatgagttgcatcgctcgaggtaatcgttccctgctcgattgataccgagtactacagaggacggtaagtaggcatcaggttttctgaagactgaataggccttatcaagtaggaaaatgggctttcgttatggggggggaaccgaatagtcggtgttggaggtagttgggtgcatgcgataaaagagcgcacaggcgcacaggcgcacaacggtcgcaccgtgtgcgcttgaacgtttggttatcaaaccgatgggaattcacatcagacttatgggatagctgacgatcaaccggttctcatcgaactcgttgttgctgtaatccctgcgcatgctggagttgcgccagcgcacgttgaggtttttcagggtgccgctctgcaccgtataacccacttcggtctcgcggccccactctttgccgtctgtgatagtgccggtgtgcacgttactgccgctgatatagcggttcatcagggtcaggcccggtacgccgagggcggcgaagttgtagtcgtggcgaacctgccaggatttttcctgtgcgttgtcgtagctggagttgtagctgtcgttggccagggtgccgccgctggtgccgttgacgcgcatccaggcgctgtcgccggtgagtttttgcaggccgacgtagaaggtgttgccgccgtacctggccgagagcaaaccggaccaggttttgttgtccaggtctccggcgcgagcgctgccgtcttccttgccgtaaaacaagcccaggttggcgcccagggtccagtcgccgacgggctggctgtggatcaggttgacgaactgctggctgtagatgtccttgagctgggcattccacacgccgacttgggtgcgtttgtcgttgaatgcgtattcggcgccctggaaattgaagcggtcggaggtgaaggcggttttgccgaccatcgacatgtcgctcatgctgccgtcgtcccgcgggctgttggcgcggaattggccgccatagagggtcaggccgtcgatttccttggaggtgatctgcccgccacgcagggtctgcggcagggagcggccatcgtcggaacgcagaatcggcagcaccggcatccattcgcccaccttcagctcggtctcggaaaagcgcgccttgaatgccacgcccagccggccaaactcatcggctggccggccgtcatggtccagcggcagcaactgcgtgccgcccgtgccacggccgccatcgagcttgagcgagtacaagcccagcacgtccacaccaaaaccgactgtgccctgggtgaaaccggacttggcgtcgaggatgaaactttgtgtccactcctgcgcgccaccctgggctttggtcgggttggtgaagttgcggttgaagaagaagttacgcaggttgaggttggcgctggcgtcttcgagaaagccgtgctcctgggcgaaaacgggcagggcagaactggcgacagcagccgccagcaacagctggcgcggttggaaagtgctcatggtgtggacctgttgttattgggtttatgcaggtggcggccatggtgcgcggcggtgcgggggcgatgaaagtgggggaaggcgggttgtgggcgatgatcgaacgtaagttgtacgggcaacaatgcaggcataaaaaaaccgcttccggtaagggaagcggttttttcacacctgcgctatcagaacaacttcaacggcggtgcttgttctttcaacggctcgttcttcgcggtctgctcgttccagccaccgccgagggccttgtacaggttgacctcgctggtgagctgcgccaggcggtcggtgatcagcgattgctgggcactgaacagttggcgctgggcgtcgaggaaggtcaggttgctgtcgacaccaatgcggtagcgacgctcggccaggcggtagtaatcctggttagcctcgacgaagccgcgctgggcatccagttgctgcttgtaggtcgcacgcgcggcgaggccgtcggagacttcctggaagccggtctggatggccttctcgtagttggccacgttgatctctttctggatcttcgagtagtccaggcttgcgcgcaggctaccggcgttgaagatcgggatgttgatctgcggggcaaacgcccaggtccccgaaccgcctttgaacaggccgcccagggtagggctggcggtaccggcgctggcggtcaggctgatgctcgggaagaacgccgcacgggccgcgccgatattggcgttggccgccttgaggttgtactcggcctgcacaatgtcgggacgacgttgcagcaggtccgatggcaacccggccggcacttcgctgagcaggtcatcggacagcggcttgctggcgatattggccggcaggccggtgcccagcagcagggtcaggctgttttcgtcctgggccacctggcgggtgtaacgcgccagttgcacacgggcgttttccaccgaggtgcgcgcctggctgaggtcgagggctgaggccacgccgacttcattgctgcgcgaggtgagcttgtagctttgctcgaacgcggccagggtgtcctgggtcagcttgagcagctccttgtcggcctgccaggtcaggtaggcattcgccacgctggccaccaggctgatttgggtgctgcggcgcgcttcttcagtggcgaagtatttttgcaacgcttcttcactgaggctgcgcacgcgaccgaacaggtccagctcgtaagagctgatccccaggccagccgagtattggctggagatagtcgactcgccagtctgcgacagcttcgccggggtgcgctggcggctaccgttgccggtggccgagatagccgggaacaggtcggcacgctggatctggtactgcgccgcataggcgtcgatgttcagcgccgcgacacgcaggtcacggttgttcaccaacgcggtctggatcagctgttgcagggcagggtcatggaaaaactgcttccagccttgctcggcagcggcctggctcggcgcctgggccgacgaatacgccggcccctgcgggaactgcgcggccaccggcgcttcgggacgctgatagtcaggtatcagcgagcagccactgagcacgaaggcggtgacggctagggaaagtagcgacttgctcattggccagcctctttaggagtttcagtagtgtctttctttttgcgttcgccagcggaggacacggttgcgtagaacagtggcacccagaagatcgccagcacagtagccgtgatcataccgccgatcacgccggtaccgatcgcgtgctggctgcctgagccggcaccggttgaaatcgccagcggcagtacgccgagcacgaacgccatggacgtcatgatgatcgggcgcagacgcatgcgggacgcttcgatagccgcctcgacgatgcctttgccttgctcatgcagttccttggcgaattccacgatgagaatggcgtttttcgccgccaggcccaccgtcaccaacaggcccacctggaagaacacgtcgttggacaagccgcgcatgctggtggcgatcagtgcaccgatcacacccagaggtacaaccagaatcaccgcgatcgggatcgaccagctttcgtacagcgccgccaggcacaagaacacgaccagcagcgacagtgcgtacagtgctggcgcctgggaaccggaaaggcgttcttcgtacgacaggcctgtccaggcgtaaccgacaccggccggcagttctttggcgatgcgttcgacttcggccatcgcatcaccggtactgtagcccggtgccggggtaccgaggatttccatcgccgctacaccgttgtatcgcgaaagcttgggcgaaccgtagatccactggcccgacgagatggccgacagcggcaccattttcccgtcgttgctgcgcacgtaccatttgtccaggtcttcgggcgacatgcggctggcggcgtcaccttgtacatacaccttcttcacgcgaccacggtcgatgaagtcgttgatgtagctaccacccaaggcaatggccagggtctgctggatatccgcgaggctgatgccctgggcactggccttctcgtcgtcaacggtcagctcgtactgcggctcgtcgttcacgccgttaggacgtacgccggccagcaccttgctctgtgctgccgcgcccaggaactggttacgtgcagccatcagcttgtcgtggccgacgccaccctggtcttgcaggaacacgtcaaaaccggtggcgttacccagctccagtaccgaaggtggcacgatggcaaataccatggcgtccttgaaggccccgaagaagtaaccctgggcacgcttggccacttcgaacaccgattgggtcgagtcacgctcatcccacggtttgagcatcacgaacgcgagacccgagctctggccacggccagcaaagttgaagccgttcacggtaaacaccgacttcaccgccttgccttcgcctggctcgccttccttgtcgttcagcaggaaggcgcgcatgtcgtcgacgactttttgcgtgcgctcagccgaagcaccaaccggtgtctgcacctgggcgaagatcacaccctggtcttcctcaggcaggaacgcgcttggaatacgggtgaacatccagatcatgccgaccaggatcagcgcatacaccaggaacgccgggatcttgtgcttgatcatgccgcccacgccgcgctcgtacttgagtacgccacggtcgaaggtgcggttgaaccagccgaagaagccgcgcttgggttggccgtgtttttccggatcaatcggcttgagcatggtggcgcacaaggccggggtaaagatcagggctacgagtaccgacaacgccatcgccgaaacaatggtgatggagaactgccggtagatcacaccggtggaaccaccgaagaacgccatcggcagcagtaccgccgagagtaccagggcaatacccaccagggcgccctggatctggcccatggacttgatcgttgcttccttgggtgataggtgctcctcggccattacccgttcgacgttttccaccacgacgatggcatcgtccaccagcaagccgatggccaggatcatgccgaacatggtcagggtgttgatggtgaagccgcacgccgccaggatcccgaaggtacccagcaataccaccggtacggtcatggtggtgatgatggtggcgcggaagttctgcaagaacaggaacatcaccaggaacaccagcacgatcgcttcgaccagggtgtgaaccacaccggagatcgattcggtcaccaccggggtggtgtcatacggcaccaccgccttcatgccaggcgggaagaacggctccagggacttgactgtttcgcggatggccttgccagtgtccagtgcgttggcaccggccgccagcttgatcgccatacccgaagccggcttgccgttgaactgtgcactgatgctgtagttctggccgcccagttcgatacgcgcgacgtcacccaggcgaacctgggagccgtcggtgttcaccttcatcaggatcttggcgaattcctcggtgctttgcaggcgcgtcttgccgatgatcgtggcgttcagctgggtgccaggcagggcaggcaggccgcccaattggccggtggccacctgcacgttctgagccttgatggcattgctgacgtccactggcgtgagctggtagttgttcagcttggccgggtcgagccagatacgcatggcgtactgcgaaccgaacacctggaagtcacccacccccgcagtacgggagatcgggtcctggatgttggacacgatgtagttggagaggtcgtccttggtcatgctgccgtcttccgacaccagaccgatcaccatcaggaagttcttcaccgacttggtcacacggataccctgttgctgcacttcttgcggcagcagtggggtggccaggttcagcttgttctgtacctgaacctgggcgatatccgggttggtaccctggttgaacgtcacggtgatggtcatgctgccgtcggagttactgtccgaggagacataacgcaggttgtcgataccgttgagctgttgctcgatgacctgcaccacggtgtcctgcacggtttgtgcggacgcgcctgggtaggtcacctggatatcaatggccgttggcgcaatggccgggtattggttgatgggcaacttcaggatcgagagtgccccgaccagcatgatcaccagggcaattacccaggcgaaaatgggacggtcgataaaaaatttcgacatggattactccccttgaccagcagcggcagcaggcgcagcagcggtaccggcgggtttggcgttggaggcttccgtgaccttcacctcggcgcccggcttgacgtactgcaagccttcggtgatgacgcgatcaccggcattgaggcctttttccaccagccagtaggcaccggcggtacggttggcaaccagttcgcgttgctcgaccttgttgtccttgttcacgatcagcgccgtcggaatgccgcgcaggtcgcgggtcacaccttgctgcggagccaggatggccttgctgttcacaccggccagcaactgggcgtgcacgaacatgcccggcagcagcacgtggtcagggttggggaacacggcacgcagggtcacggaaccggtggtctggtcgaccgacacttcggagaattcgagcttgccgtcctgggcgtaggccgtgccgtcttccagggtcagcttgaccttggcggcgttttcgccggccttctccagctggccgctttccaggtcgcggcgcagtttcagcatttcagccgaggactgcgtgacgtcgacgtagatcgggtccagttgctgaatcacggccatggcatcggcctggccattgctgaccagtgcgccttcggtcaccgaagaacgaccaatacgcccggagatcggcgcaaacactttggtgtagcgcacgttgatctgggcggtttgaacgtttgcttcggcggtcatgcggttggcgacggcagtgtcgtattcctgacggctgacggcctgttcatcgaccaactgcttgtagcggtcgctgatggacttggtctgggacaggctggcttgtgcgcttttcagggtggcctcatacaccgacgggtcgatctggtagagctgttgcccttccttcacgtcggcgccttccttgaacaggcgcttgagaatgatgccgttgacctgaggccggacttccgcgatgcgaaaggccgtggtgcggcctggcagctcggtggtcagggtataggcttgcggttgaatggtgaccacgccgacctgaggggtttgagcgggcggtgccgcttcttcctttttacatccgctgagcagcgatgccagggcgacggcagtgaccagagcggtaacagctggcttaagttgcatgaagatcctcgggtcaggcgcgcagagtgcgcacaagaagtgtggaagggtaaaaaacaagccgtgagtggataagtagcttgctacgcaatatacttacgttcatggttgtttgtaaactcttgacaggcttcgcgcaatgttgacaaagcactgccgcaagcctcgattctagtacgttcggcgcccatgacggcgtcgtcccacaattattcagatgacggtcaagtaccgtccacagtgtcccgattgaggttttactgccatggttcgtcgcaccaaagaggaagctcaggaaacgcgcaaccagattctccaagccgccgagcaagccttttatgagcgtggcgtggcgcgtaccaccctggcggatatcgccgcgctggcgggcgtgacgcgcggggctatctattggcatttcagcaataagtccgatttgctccaggccttgctcgacacgctgcacgaacctctggacgaattggcccgggcgagtgaaagcgaggatgaagtcgacccgctgggctgtatgcgcaagctgctgattcatctctaccatgaagtggccctggacccgaaaacccggcgcatcaacgagattctgtttcataagtgcgagttcaccgatgaaatgtgcgacatgcgccgccagcgccagacccacagcctggaatgcaacctgcgtatcagcctgacgttgcgtaacgcggtcaatcgcgggcaactgcctgaaaatctcgacaccacccgtggggctgtctgcatacatgcctttatccacggtttgatcggccagtggctgctggtccccgatagctttgaactgcatcaggacgccgagcgctgggctgatatagggctggacatgctgcgcctgagccccagcctgcgcaattgaaacaaaatgcgtaattgcaacccgttgtgtcaacagtaaagcctaaagacggtcaatcgtccttctgcctgatttgtggggtgactttatatacggcatggcgggcggttgataggtagccggctaagtattttgtagcgatattgttgcggttctgtgaagcgatgtttccagggggcacaaatgtgggagggagacttgcccctgacactgtaggcgcgagcttgctcgcgaaaaactaacaggcgccgcgttcgttcaggaagcgcgcgttattgttgacgtttttcgcgagcaagctcgctcctacannnnnnnnnnnnnnnnnnnnnnnnnnnnnnnnnnnnnnnntattgttgacgtttttcgcgagcaagctcgctcctacagtattgggtttgcgggttacgttagatcggcagcgtcgggtagtcgatataacccaccgggcctttgccatagaaggtttccgggtgcggctcgttcaacggtgcatcagccttcagtcgcgccggcagatccgggttggcgatgaaaggaataccgaaggccactgcgtccgccttgcccgccgccagccaggcattggcgctgtctttggtgaagcgttcgttggcgatgtacgcaccgccgaaggcttttttcagctgtgggccaaggctgtctgcgccttctttttcgcgggagcagatgaacgcgatgccgcgcttgcccagttcgctggcgacgtaggtgaaggtctcggcgaggttgtcgtcgcccatgtcatgcgcatcagcacgcggtgccaggtgcacgcccacgcggccggcgccccagacttcgatggcggcgtcggtgacttccagcaacaggcgcgcacggttttccagggagccaccgtactggtcggtgcgctggttggtgctgctttgcaggaactgatcgagcaggtagccgttggcgccgtggatttccacaccgtcgaaaccggcggccttggcgttctcggcgccggtgcggtaagcgtcgacgatgtcggcgatttcagcggtttccagggcgcgcggggtcgggtagtcggccagggggcgaaccaggctgacgtggcctttggcttggaccgcactcggggccaccggggtttcgccgttcaggtaggactcgtgggaaatgcggccgacgtgccacagttgcaggaagatcttgccgcccgcgccatgcacggccttggtgatgttggcccagccgcgcacctggtcgttggaccagatgccgggggtgtccgggtagcccacgcccatcggcgtcacggaagtggcttcgctgaggatcagcccggcggaggcgcgttgcacgtagtactcggccatcagcgcattgggcacgcgcccggcatccgcgcggcagcgggtcagcggcgccatgatgatgcggttcgacaggtgcacatcgcccagtgtgatcggatcgaaaatagtcgtcatggaaaaacaccttctctttaagttgatcagtgggtcgcgggggccaggtcggcattgccgccctgacggaaagtgatcagggtcaccagcagcgcgagaatcgccagtgcggcggccgccagcggcacgctggtcaggccgaagccgtgggcaatcacgctgccgccgacccaggcgccgagggcgttgccaatgttgaaggcgccgatgttcaaggtggacaccaggttcggcgcggccttgccgaaggtcaccacgttgatttgcagcgccggcacggcggcgaacgaggcggtggcccacaggaacagggtgatttcagtcggtatcaccgcgacgctggtccagctcagcaccgtggacaccaccgccatgctgatgaacacgccgatcagggtggccgccaggcgcttgtccgccagtttgccgccgatgatgttgcccacggtgaggcccaggccgatcagcagcagggtccaggtcacacccttgggcgacacgccggtgacatcgccgagcagcggtgcgacgtaggtaaagagggtgaacatggacgcggcaaacagcgcggtcatgctcagtgataaccagataccggcacccttgagggcggccagttcagcgcgcatatcgagtttttcttcgtcacgcttggcgggcaagaagcgaatcaggccgatcaaggcgatcacgccaatcacggtcacggcccagaaggtcgagcgccagccggcttcctggcccagcgccgtacccaggggcacgcccagcacgttcgccagggtcaacccggtgaacatcagcgctaccgccgacgcacgtttgttggccggcaccaggttggccgccaccaccgagccaatcccgaagaaggcaccgtggcacaacgctgtgaccacccgggcaaacatcagcacgttgtagtcgcttgccagggcgcagagcaggttgccgataatgaaaatacccatcaacgctaccagcgccgccttgcgtggcagcttggcggtggccagtgccatgaacggtgcgccgatggccacgcccagggcgtagccggtcaccagccagccggcgccgggaatcgacacacccaggtccgccgccacatcgggcagcaagcccatgatgacgaactcggtggtgccgatggcgaaggcgctcagggccagtatgagtagcgagaggggcatggggtgtgtccttggtaattacggtgcgctgagttcggtgatgagcgccgtgagaaaggcttggatcacctcctcgttgcgcttgaaaaagtgccactgcccggccttctggctgctgatcaaccccgcccgttgcaaggtggccaggtgggccgacacggtcgactgggacaagccgcagcgctggtcgatctgcccggcgcagatgccgtattcgtggttgtgcaattgctcggggaactgcactttcgggtctttgagccaggtgaggatgtctcgtcgtactgggtgcgccagggcttttattatttcgtcgaggtcgatggacatggcagggtgctcggtgtcgtaaagcgttatatcgcgatgaggcgaactttaaatcgtcatatcccgatataccaatatgattttgatctgaggccaaagcgaatcggtatatcgggttataacgatatgtgggtggcagtggtagactgcgcggcatgaattatctcgcacatctgcacctgggcggccaacttcctgcacaactgctgggcagcctctatggcgacttcgtcaaaggccgcctgcagggccagttcagcccgcaaatcgaagcggcgatccagctgcatcgctccatcgaccggttcaccgacagccaccccttggtgggggaggcgttgtcgcgtttcagccagacccgcaggcgctatgccggcatcgtcctcgatgtgttttttgaccattgcctggcgcgcgactgggcgctgtatgccgaccaacccctggagcgtttcacgtcgcaggtgtatcgggtattggcggccgaacccgcgttgccggggcggctggcgcagattgcgccgtatatggcagcggatgattggttgggctcgtaccgcgagtttgcggtgatggaccaggtgctgcgcgggatttcgcggcggctgacacagcccgaggagttagggtatgcgatgcaggagttgcgggttttgtatgagccgctgagtgaggactttcgactgttctacccagagttgcagaaatttgcacaatctcaactgactacatgagatctgaatgtgggagctggcttgcctgcgatagcggcctacctgttgagaatgctgtggctgacccaccgccatcgcaggcaagccagctcccacatttggatggtgttcacattgcttcaggctgcgaatgcaggccgagcagacacttgctcagcttccggcaccggcccaaacaacgccttctgcaccgcctgctgcgcctgatacgccaatgccgcacgttcctgcccggcgcaggcaatcggcttgagcacatgaatctccacatcgccgcggtcattggaaaacaagcgcatcaggtgcgagagcaaatcatcatcgccaataaagggcgccagcgggtcgacttggccgtcgcgcagataccgaatcgctaccggctgcagtgacacatccgcatcgatcgcgctggccagcaagcgcccgtggaacgtgcgcaggccgcgaccgtcggtggtggtgccttcggggaacatcagcaaggggtgctgttgctccagatgacgggtcatctgcttgcgaatcagttggctgtcacctgaaccgcgacgaataaacaggctgcccgccttggccgccaaccagcccgccaccggccaggtacgcacctcggccttggacaaaaacgacatcggcgccaccatgcccagcaacgggatgtccgtccaggacacgtgattgctcacccacagcatcggcgtttgcggcaactcgccgtgcaccgtcacacgaaagggcagggcgttggtcagtcgcgccataaagaagcgtgaccaacgctggcgccgcaccatcgagttagccacgcccaggcgctcgaacaggccgaacacactggccatgctcaaccccagccccaccaccaacagcacgcgggcgatgcgcccgtaaatgcgcaggcggttcatcacatggccgccttgaagtggcgcgcgtagcgcgggcacaactcgtcacgcttgagcaggataaacacgtcggccacctggaagtcttcatcccagcacggctcgccgcagatcttcgcgcccaggcgcatgtaggccttgagcagcggcggcatttcggcgatgacgttggacggcaagtccagggccggcagcggttttttcggttcggcgcgcaggtgttcgttgcacaggtagcgctcgcgcaagcgctgcatgatcgcgtgggcctggatgccgccatcgtgcatcgggatgcttgcgcagcccatcaggtagctgtagccaccctggttgagcacctcggccaactcgccccacaacaccgcgatggtgccgccattgcggtaggccgggtcgacgcaggtgcggccaatctccagaatcgggccctgcaagtgcagcaggccatgcaggctgaattcttcttcgctgtagaaccggcccagggtgctggcggcctggtggtcgagcagacgggtagtagcgacgagtcgaccgctgttcaaatcccgcacgccgatatggctgcagtgaacatcatagtcatccatgtccagacccagttccgcgcctttcagcttggcgttgaattcgccgctgaatacgttgaaccgcagggcctgggcttcctgcaatgcctgtgcgcctaccaggcgttcggcttgcagacggcgttcattgcctttgtcgctgatgcgggcgatctgagtcatagcgagtctccgggtgccggccaggttgcggccagtcgactttgttgtccaaagtcaggctatgtagcctcggtgtcagctccatgaagttacggtgacggttggatgacagcccccttgtcgcaaatctgtcactggcgtgagctaggctcgcgggcttgaatgccctccttgagtttgcgtccatggtccgaggcctgttgtgcgttgccctgctgtttgtcaccgtgaatgctcgcgctgaaatctggcctgataaggagtgggccctgggcacagccctcgccggccgcgctgtcgatgccctggacgcctacgctttcccaacccgcgacgatgccacccgcaccggtattcgcaccgatgcgttgttggtcattcgcgacggcgaaatcatttatgaacgctacgccgcgcccaccactgtgagcacaccgcacctcacctggtccgtcagcaaaagcctgatggctaccgtgctgggcgtggcctatgggcaaggccgcttcaaactcagcgacgccgccgcacgtttctacccgccgatgaagcagcaccccaaggtgagcatggccgacctgctgcactgggcctcggggttggattggcaggaagactacgagtacgccccgttgaaatcttcggtggtggcgatgctttacacccgtggccacacggacatggcgcaattcgcagcggataccgaagccgccgccgcccctggccaggctttccgttattccagtggcgacagcaatatcctctccgctgcgctcaagggcatgctcggccacaaggcctacatgacctacccgtgggacgcgctgttccagcccctgggcattcgcgacgcaacctgggaaaccgatgccgatgagacgtttgtcgcgtcgtcctatgcctacctcacggcccgagatctggcacgggtcggactgctgatggcgcgggatggacgctggggcgagcggcaactgttgccccaggactgggtcgcctttaatcgcaggcccttcgaccactacaaagccggccaggatgaagccgtgccgggcggccattggtggctcaacaccggcgccccccaaccctggcccgacgcaccggccaccaccttcgccgcgctggggcactggggccaggcgctgtacgtgctgcccgacgaacatctggtgatcgtgcgctacggcgatgatcgggatggccgttaccggcataacgaactgctcaaacgcgtgctggcggcggtgcgctcatgattcgtcgtcatccatttatcagcgttttactggtgttgtttatcgcactcttgggcggggtttggcatgagcgcgtcaacctgcaagcctttcccgacatcatcgcggcgtacaccgccaaggagtattgctcgtgccggtatgtggcgaacaaccctgcggagtattgcctggggtatgtgaagcagtacgtgcccatcagtgcgtttatcgacacgcctgagcgcagtgaagtgacagcgagtgggttggggcgtacgcatacagcgcgatggataggcaaccgccaaggctgccgccttaacccctgacacacccaaatttccctgtgggagctggcttgcctgcgatagcggcaggtcagtcaacatcacgagtgcctgtgccgccgtcatcgcaggcaagccagctcccacatcgtatttgtgctgatcatgggcaattgagagagatacagacaagcgcccgatgcggcgcaccgggcgcgtactacttacagcaggttttgactgccaggctgcatcgccagcagcaagtcatcaatgatcgccttacccatctcacccagataatgcgaggcaaacgcaaacttttccgccttggggtccatggccgcttcaagcgcgagcattttggcgtagtagagcacgtgggaggcgtgttcgagggcttccacaagcggaaccccggcgttgacgcggaacagtttcaggtggcttttgttttctccgcaatctgcgaaggtggcagcgccgatggtttcggctgagggtatttcgtacggcataagcttgctcctttggtacaaccaaaaagagctgccattcacgattccaagcatgagggtggcagctgtacgcaggttggaatccgagaagaagcaactcggcaggcacaaggcctcccacgcacagccgccataaagcacaaacagcgggcacaaaaaagcgccgactgattgtatgacgacgctgtagcgtcttctttctcgggattccacgcccggtcgctgatgagcagcgacgccgcagagattaacgctatgcacgtgtcctcgcaaccggtggcaaatagctgttgtggcgagggagcttgctcccggtagcggtggggcagttacaaatgtttagctgacactccgccatcgcagcaaaggtatctacacaactttctgggctgtagcagcagacgctaaccacgatgcggagcgagccgctgttgatcttgctctgcttttgctcttgatcttaggcgccccgtcaaaccacgctggccgaacacaggcttgaattcgtgggtaacccggcaggacgccgggttagccgccccgcgccatggatggcgcgtggcggcggcccacggattcaagcctgcgttcgggcacaccgagccaaagcgaggggccgagtggtggggcaagagcgttttgcttactttgccgcttttgcaaagtgagccgccgtcagggcggaaccctaagtggccgttaccgcagaaatggatatgtactcggtataacagtgtcgcctgtcaggccgccttcgcgagcaagcccgcagttggatcgcggggtgtcaggtagataggtgtcggctggcaggccgccatcgcaggcaagccagctcccacatttggatcgcggtgcgtcagctagatctgcgtcatctgtcactccgtcacgggagcaagctccctcgccacaggaccagcgtcgcaccaaagttgtgtagatacctatggccatcgtaggcaagccagctcccatctatggatgtgtgtgggctcacggaaaaaagctcggccctgatgttccacagagtggaaccacctttgattgtcctcacgcgcacatcgcgcttagctgtcgatgtgttgcaaacaagaacgggaccacccgcctgtgaggagaatcaccatgcgcccgcaccagcacattctggattggctcagcgacgttgccagcgacttgcacgctgtgcgtcacgatatccacgcccatcccgaactcggctttgaagagaatcgcacctcagcgctggtctcacagtcactcaaggagtggggctatgaggtgcacaccggcatcggcaagaccggtgtggtcggcgtgctgcgcaatggcaacagctcgcgcacgttgggcattcgcgccgacatggacgccttgcccatcatcgaaaacaccggtgcggcctataccagccagcatgccggctgcatgcacgcctgcgggcatgacggccacaccaccatgttgctcggcgccgcgcgttacttggcggcgacgcggcagtttcacggcaccttgaacctgattttccaacccgccgaagaaggccagggcggcgccgaggcgatgttggcggacggtttgctggagcgtttcccctgtgaggcgctgttcggcatgcacaatatgccgggcttgccggctgggcatctgggcttgagggtggggccgatgatggcctcccaggacctgctcaccgtgaccctcgaaggcgtcggtggccacggctctatgccgcaccttaccgtcgatccactggtggctgctgccagtatggtcatggccttgcaaacggtggtggcgcgcaatatcgacacccaggaagccgctgtcgtcacggtcggcgcccttcaagcagggcaagccgccaacgtgattccccagcaagccctgctgcgcctgagcctgcgcgcacttaaccccaaggtacgcgaacagatgctggaacgggtcaacgcgatcatccagacccaggccgccagcttcggctgcaccgtgcaggtcgaacaccgcccggcttacccggtgctggtcaaccatgccgaagaaaccgaattcgcccgccaggtcggtgtggccttgctcggcgccgatgcggtggacggcaacacccgcacgctgatgggcagcgaagacttcgcctggatgctgcaacgctgccccggcagttacttgtttatcggcaacggcgtgtcgcggccgatggtgcacaaccccgcctatgacttcaacgacgacatcctgctgaccggcgccgcctattggggcgcgctggccgagagctggctcaagccggccggctaacccaaacccttgtaggagcgagcttgctcgcgaaaatcgtcaacgctgacgcagcgctttgaggtggcccgtgttgcctgcgcgtttttcgcgagcaagctcgctcctacagtaacgcctttttctgccgctggaccctttccctgatcggttgaatggagtgttcctcatgcagactttaaagcccggcgtttcccgcacccgccaagtggtggccgcggtgatcggcaacgcgttggaatggtatgacttcatcgtttacggtttcctggctagcattatcgcccgtcagttcttcccctcggaggacgaatacgcctcgctgctgatggcgctggccaccttcggcgtgggctttttcatgcgcccggtgggcggcatcctcttgggcatctacgccgaccgcaaaggccgcaaggcggcgatgcagttgattatccgactgatgaccgtgtccatcgcgctgattgccttcgcgccgaactatgccgccatcggcatgggcgcgccgttgttgatcgtggtggcgcgcatgctgcagggctttgctaccggcggtgagtacgcgagtgccacggcatttctggtggaaagtgcaccggcccatcgcaaggggttgtatggctcctggcaattggtggggcagtgcctggcggtgttcggtggggcggcgatggtggcgttggtcacgcatttcttttcgcccgaaaccctcgacctgtggggctggcgcctgccgtttgtgctgggcttgttgatcggcccggtggggttgtggattcgtcggcacatggaagaccccgaagaattcatcgaggcgcgcaagcaggccaccggaccggcgccgagcctcatgcaagtgctgcgtgagcatcggcgcagtatcctggtgtcgatgggcctggcctgcggcgcgacggtgtcgttttatgtggtgctggtgaacatgccgaccttcgctcacaagaacctcggcctgccgctggatcaggtgttgatggtgcagatgtttgcggtggcgttgatgaccgtggtgattccgttatccggcctgctctcggatcggttggggcggcggccagtgctgatggccttcaccctggcgtttttcgtgatggtctaccccttgtatgtgtgggtggccgccgcgccgtccatcgagcgcctgctggtgatgcaggtgatgttgtgcaccgcgattggcgggttcttcgggccagcgccgacggcattggccgaacagttccctatcgaggtgcgctcgaccggcgtgtcggtggcctataacgtggcggtgatggtgttcggaggtttcgcgccgttgatcgtgacctggctgagcaaagtgctgggcacgccggtggcgccctcgttttatgtattgttcgcctgcgtgctgacgctgctgggcacttactgcatgcgcgaggccccccgggcgagcaagccgttgccgttttccagagaggtgaagccttgagtattgttgattgggatgccactgaactgtcgcgggccattcatgggcggcaggtgtcgtgcgaagaggtgatgcaggcgtacctggcgcagatccagcgctttaacccctgcgtgaatgcgctggtgacattgcgcgacagcgaggccgtgctggccgaggcgagggcctgcgatcgggagttggaccagggccgctcccgtggctggatgcatggcatgccccaggccatcaaggacctggcggccacccagggcttgcgcaccaccttgggctcaccgttgttcgccgagcatgtgccgggcgaagacgccatcagcgtggcgcgggtgcgggccagtggcgcgatcatcatcggcaagaccaacgtgccggagttcggactgggttcccacacctacaacacgctgttcggcaccaccggcaatgcctatgacccgcgccttgcagccggcggcagcagtggcggggcggcggtggccctggcgctacgcatgctgccggtggccgacggcagcgacatgatgggctcgctgcgcaacccggcggcgttcaacaacgtgttcggcttgcgcccctcacaaggacgggtgccccacgggccgatgccggagttgttcgtgcagcaactgggcaccgaaggcccgatggggcgcagcgtcacggatgtggcgcggttgctgagcatccaggccggttacgacccccgcgcgccgctgtcctcccaggccgatccggcggtgctgggccagccattgcagcgcgacttcaagggcgcacgccttggttggctgggggactacaacggttatctgccgatggacgcgggcgtgatgagcctgtgcgaagcggcgctggatgatttcgccaggttgggctgtgaagtgcacagctgccaaccggacttttccatggcgcgcctgtggcgctgctggttggttcatcgccattggctggtgcacggcaacctcggcgcggcctacgccaacccgcaaaaacgcgcactgctcaaacccgaggcccagtgggaagtggagggcggccagggtttgagtgctcaacaggtgtaccaggcgtcggtggaccgcagtgagtggtaccgcgccctggccaagctgttcgaacgttacgatttcctgctgttgcccactgcccaggtgttccctttcgatgcacaacagccgtggccacgcctcgtcggcgggcgtgaaatggacacttatcaccgctggatggaagtggtgatcggcccgaccctcgccggtttgccgagcatgagcatccccgtgggcttcaacccccagggcctgcccatgggcctgcaaatcattggcccggcccaggccgacagggccgtgttgcaattggcctacgcccatgagcaactgacccaatgggtacaacgccggccaccggcgtgccttgcaacgacccgctgagcgctgacgggcctgtatcttgctgtgaaaaaagatcatccaccggcaacagggagatcgaacatggagacaggcaccgtacgctcggttgagcgcgctctggcaatcgtcgaattgctgggcgagcaccaggccctggggctggaagagttgcactacctcacgcgcctgcccaaggccacggtgtcgcgcatgttgctgaccttgcaggagcagggctgggtctatcggggcctgagtgatcggcgttaccgcctgcgtgcccgacgcttgttcggcgacacccagcaacgcttcaagcgccaggtggtggagagcgccgcgccctggttgctggaactcagcgagcgcaccgggctggtggtggacttgtcgtgcttcgatggcgagcgcctggaggtcatggagagtgcgattcccagtgtgttgcgcaagctgtacccgaacaactgccagatcgtcggccagtatgccagcctgttccattccgcgatgggcaaagcctgcttgacgcaattgccggccgaagaagtacagcgcctggcaggccgcaatcatgtggcggcagacgagcactatcgcgcatgcgagcaaacccagcaccagggctttggccagcgtaccgagggctattgggaatatcctgtgcgtttgccgttcctgatccgggcggtggcgctgccggtgcgcgccaatggccgcctggtggggagcatggcgttgcattggccgatgcatcaggcgccggtggagcgggtgttgaatttgcatatgggcagccttgaagaaacgatctgcgaagtgcagcgagcgctggtttgatagtcaccgccgaataaatgtgggagcgggcttgctcgcgaaggcggtgtatcagctacacatgtattgactggcactgcgctttcgcgagcaagcccgctcccacaatgaatttgcgccgttcatgagattgcgcttatggttcgctcaggttttcccccgcgagtcttcaatgtcaatcaaacccttggccttcgcccttttggccgctgcagcagtgcccgcccacgccgactggtacctggataacgaatcctcacgcctgtccttcgtcaccaccaaaaacaccgaaattgccgaagtgcagcgcttcctggtgctgcacggcaaggtcgacgccaaaggcgcggctcagttggaagtggaactggagtcgatcaacagcggcatcccgctgcgcgacgagcgcatgcgtagagagctgttcgagatcaagaccttccccgaagcgcagatcagcgcgcagatcaatctgcagcccatcaacgacctggcgtccggcgcgcagctggaattgcgcctgcccctgagcgtcacgctgcacggcaagacccagacctacagcgccgaactgctggccacgcgcctggatgatcgacgtttccaagtggtgaccctggagcctgtggtattgcatgccgaggattttgacctggcgccgggtgtagccgccttgcgcaaggcagcggggctcaagtcgatcagtttgtcggtgccggtgggtgcggtgctgatcttcacggcgcgctgacatgagcggcgcggtgttcccgtggcgcagcgccaatcagttcgaattgctgatcgacgggccgaatttcttcccgcagatgctggtgggcatcgcccgggccgagcagcaggttgaccttgagttgtacctggtcgaagccggggcctgcgccgaggccatggtgcaggcactggtgctggccgccgaacgcggcgtgcaggtgcgttgcctgttcgatgattacggcagcctggcgtttaccctggggctacgcaagcgcttgaccgatgccggtgtggagttgcgcttttacaaccgcctgaattggcggcgctggatgcgcaacctgtatcgcgaccaccgcaagttgctgctgattgatcagcgtgtcgccgtggtcggtggtacgggcgtcaccgacgaattctggacgccgggccaagacaccgccgactggcatgaagtgatggtgcagatcagcggcccgctggtgctggactggcaggccctgttcgaccggcaatggcacgctaacgccgcgcgccgagaatggaaaccggcgacccactttggtttgcctcgcttgcccaaggtgcccgccaccgggccggggctgggccgcgtggcgtatgccgatgcgcgtcagcaccgcgacattctgcaatcattgattcgcgccttgaacagcagcaaggggcgtatctggctggcgaccccgtacttcctgcccacctggagcgtgcgccgcgccttgcgccgggcggctgggcgcggtgtggatgtacgtctgttgctcaccggcccgcgcaccgatcacccgtcggtgcgttacgccgggcaccgttattacccgcgtctgctgcgttcaggggtgcagatcttcgaataccagccgtgctttctgcacctgaagatggtgctggtggacgattgggtgagcattggctcgtgcaatttcgaccactggaatttgcgctttaacctggaagccaatcttgaagcgctggacccgggattgacggcggcggtggtgggcagtttcgaagcggactttgcccagagccaggcggtgagtctggaggcatggaaggcgcggccattgtggcggcgggtaaagcagcgggtgtggggctggattgatcggttggtggtgaacctgctggatcggcgcggctagtcggttcacctcaagtccaatgtgggagctggcttgcctgcgatggcggtggtgaatattccaccgctatcgcaggcaagccagctcccacccagaccgtgtttacagcttcagatcagagcagttcgaaggtttgttgctgcacatcctgggagtccaacccgatctgcacattgaactcacccggttcggccgcgtacttgagctggctgttgtagaacttcaggtcgtcttcggtaatggtgaagtgcagcgtgcgcgcttcgccggccttgagcatgaccttctggaagctcttcagctccttgatcgggcggatcatcgaaccggccacgtcctggatatacaactgcacaaccgtttcgccatcgaccttgccggtgttcttcaacgtgacgctggcgtcgagcttgccggtcttgttcagcgtggtggacgacagcgccatgtccgacaggctgaactgggtatagctcaggccataaccaaagggaaacagcgggcctgtggtgtcatcgaagtactgcgaagtgtagttgcccggcttgcctggggtgaatggccggccgatggtcaggtggttgtagtaggttggaatctgcccaacggagcgagggaaggtgatcggcagcttgcccgatgggttgtaatcgccgaacagtacatcggcaatggcgttgccgccttcggtaccggaaaaccaggtttccaggatcgcatcggcctgttggttttcttccagaatcgacagcggacggccgttcatcagcaccagcaccagcggcttgccggtggctttgagggccttgatcaagtcgcgctggctttgcgggatgttcaggtcggtgcggctcgatgactcgtgggacatgccacgggactcgcccaccgccgcgacgataacgtcggcgttgttcgccgccttcaccgcttcgtcaatcagcacttgggcagggcgcgggtcgtccaccacttccggggcatcgaagttgaggaagttgaggtagtcgagcactgccttgtcgccggtgatgttggcgccacgggcatagatcactttgcctttttcgccgatcacggcgttcatgccgtcgagcagggtcaccgactgcgcaggccggccggcagcagcccaactgcccatcatgtcgatgggggccttggccagcgggccgaccagggcaatggtcgcggattttttcagcggcagggtgtcgttgtgatttttgagcaacaccaggctgcggcgcgcaatgtcgcgggcctcggcccggtgcaggcggctgtcggcgtaggtgtcggccgggtcatcctcggccttgccgatgcgcaggtacgggtccttgaacaggcccatgtcgtacttggcgccaagcacttcgcgcacggcgttgtcgatgtcgctctgctggatttcgccggacttgagcagccccggcaattccttgccgtacagcgagtcgttcatgctcatgtcgatgccggccttgatcgccagcttggcggcttcacgcccgtccttggccacgccgtgcttgatcagctcgaagatcgcgccatggtcgctgacggtcaggcccttgaagccccagtccttgcgcagcaggtcgttcatcagccaggtgttggccgtggcaggcacgccgttgatcgagttgagcgccaccatcacgccgccggagccagccttgatcgctgcgtggtagggcggcaggtagtcctggtacatcttgaccgggctcatgtcgaccacgttgtagtcgcgcccgccttccaccgcgccatagagggcgaagtgcttgacgctggccatgaggctgtcggcattcgcggggctggtgccctggaacgccttgaccatcacttcggcaatgcgtgacaccaggtaggtgtcttcaccgaaaccttcggaggtacggccccagcgtgggtcgcgggagatgtcgaccatcggcgcaaaggtgatgtcgaggctgtcggcagcggcttcctgggcggcgatgcgcccggagcggccgatggcgtccatgtcccaactggaagccagggccaggctgatcgggaaaatggtgcggtggccgtggatcacgtcgtaggcgaagaacatggggatcttcaagcggctgcgcatggccgcgtcctgcatcggacggttttccgggcgggtgatggagttgaacgtgccaccgatgcggccggcggcgatttccttgcggatcagctcgcggggcatttccgggccgatgctgatcaggcgcaattggccgatcttctcatccagggtcatttgcttgagcaggtcgctgacaaaggcgtccttgtcgttaagcgcagcaggctttgtttctgcccagacggggtgggtggccagcgttgcaacaaggccgagcaaacacagctttttcatgaatatcctttttcggctactgcgcagcattcaaagcgatgctgtcggccaaaatgtggggaacgtctattgttgttcgggtgttgttcagataaatgcagcacactctgaactctttttcgcgctgggcatctttgtagctgattggctcgaagcattccagtggtggcggattatgccccaagcgcgtggtttatagggttagtcgtcacattccatcagatcgggcaggagaaacaccatgcaagcagcacaacattaccgctggggcttcaaggctgcggcgctgttactgatcagcagcgtgctgagcggttgcggcatcaacaacatccccacgctggacgaacaggccaaggccgcctggggccaggtgcagaaccagtaccagcgccgtgccgacctgatccccaacctggtggaaacggtgaaggcgtatgccgcccacgaacaggaaaccctcaccgcggtgattgaagcgcgggccaaggccacctcgatccaggtggatgccagcaccctggacaaccccgagaaactcaagcagttccagcaagcccaggatggcctgagcggcgcactcagccgtttgatggtggtgtccgagcgttacccggacctgaaggccaaccagaacttcctggccttgcaatcccagcttgaaggtacggagaaccgtatcgccgtggcccgtcgggatttcatccagaccgtgcaagcgtacaacaccgagatccgcactttcccaggccgtctgtggcacagcgtgatgtacagcgacttgccgatccgcgccacgtttgaagccaccagcgccgatgccgataaagcgccgcaagtgaagttcaaataaggctgcactgaggtgtcgatgcgtttattacggataggcctggcgctgtggctgttggcctgcttgggcgttgcccaggcggcgctgaccttcccggcgctgaccgggcgggtggtagacagcgcgcagatgatcgacccagcggtgcgcgagcaactgacccagcaattgcaggcgctggagcaaacctcgggcgaccagttggtggtggtcaccgtgcctgacctgcaaggcgtgcccattgaggactacggttatcagttgggccgccagtggggcattggccagaagggcaaggacaacggcgcgctgttgatcgtctcccgtgatgaccgccagttgcgcatcgaagtcggctatggcctggaaggcgtgctgaccgatgcgcaatcctgggtgatcatcaaccaggtgatcctgcccaagttcaaggccggcaatttcagccagggcatcagcgatggcgtggctgcgatgattcaggtggtgggcggggagccgttggcggtgccggcccatgtggcggatgcgaacttcgccatggataatcccggcttttccatcggcctgtttattctgctgatcggcgtgttgtggttgtgcaatcgcatgggcttgccggtgggcgccatcctgctggcgattctcaacagcagcgggcgcggcggcggtgggggcggcggtggcggtggtttccgcggcggcggcggtggctttggcggtggcggggcttcgggcagctggtaatgacaataacgagaatagagcatctacaaccatggcattactgactgaacacgagcagcgccaagtcgccgaagcgatcgcccgggtcgagaaaaccaccgacgcggagttggtcaccgtgctggcggcgcgcgccgacgactacgcctacattccgttgctgtgggcgagcttgatcgcgttggtggtgccgggcgtggtgcattacctgtcgggctacctgaccatgtacaccttgctggtggcgcagtgggcgacgttcattgtgctgtgcctggtgttccgcttgcccaaggtcactacccggctgattccgcgttcggtacgccactggcgtgcgtccaacctggcgcggcgccagtttctggagcagaacctgcaccacacagtgggcagcaccggggtgctgatttttgtcagcgaggccgagcggtatgtggagatcctggtggatgacgggatttccaagcgcctggatgacagcaattgggacgccattgtccaggcgtttacccagcaggtgagacaggggcagacgctcgccgggttcatcgcctgcgttgaagcttgtggcgagttgctcaaggtgcatgtgcccgttacccaaacccgcaacgaactgcccaatcgcctggtcgtgctcgaataactgctttctgtgggagccgggcttgcccgcgatggcatcgcctcggtttgcctgattaaccgagttgcctgcatcgcaggcaagccagctcccacacaaggcagcatccttattcgggttgattgaccgttgatcaaataaccccgtgccctgaacccccatcccgcctaaaatgcccggcattctttacccgaggcgtttttgttcatgtccgtcaccgctcaacctgcccgccctgcgccggatcatcatgcccagttcatcgaactgttgagcgcaagcttggcccagaacgcttttatcaagctggtgctggccaagtacgtcggtgaggaagccgagttgcagcggctgatcatcaagccggtggtggtcaaggaccagccttgcctgtcgttcgtctatcgctacaagacccgcgacatcaccaagaacttcccctcggctgacggcgtggcggcgattgccgagctgttgcccagctcgttcaagaacgcgcacttgctggcgctgaccgacgaagcccagctggagtacagcaagaagaacaaaagctcgctgttcaaaagcaagccgcagcaactgcgcgaggcaccttcggccgagcataaccgtgaaaaaaatcgcttcctcgacctgagccggccgttcctcgccgacctgggcgtgaccgacgccaagcaggcgctgatcccctcgatgtcgcgcaagtggaagcagatcaacaagttcatcgaagtgttcagccatgcgctgacgtcgtcgccgttgcagctcgaccgcccggtgcgggtcgccgatttcggctcgggcaagggctacctgactttcgccattcacgattacctgcgcaataccctcaaggccgagggcgaggtcaccggtgtagagttgcgtgaagacatggtcaccctctgcaacagcgccgccgcacgcctggagcatccggggctggtgttcaaatgcggcgacgtgcgcagcgtggcgcccagtgagctggacgtgatgattgccttgcacgcctgcgacatcgccaccgactacgcgatccacaccggcatccgttccggtgcgtcgatcatcatgtgttcgccgtgctgccacaaacagatccgcctgcagatccagagcccggcgttgctcaagccgatgctgcaatacggcctgcacctgggccagcaggcggaaatggtcaccgacagcctgcgtgcgttgttccttgaagcctgtggctatgagaccaaggtgttcgagttcatctcgctggagcacaccaacaagaacaagatgatcctggcggtcaaacgtgccgagcctgtggacaacgcgcagctactggcaaaaatccaggagctcaaggcgttctatcacatcaccgaacactgcctggaaaccctgttgcgcggggatggctacctggcctgaaatggacgcggttcgctgtgggagcttgctcccgtgacggccccggcggccagcgcatatctacctgacgccccgcgatccaaatgtgggagctggcttgcctgcgaaggcggcctaacagtcaacacagctggattgtgtacatatccattgctgcggtaacggccacttagggttccgccctgacggcggctcactttgcaaaagcnnnnnnnnnnnnnnnnnnnnnnnnnnnnnnnnnnnnnnnncatccatggcgcggggcggctaaaccggcatccctgccggtttaccccccaaatccctgtcgaattacggccagcgtggtttgacggggcgcttaagatcaaaatcaaaagcagatcaaaagcagatcaagagcggctcgcttcgcatcgtggttaccgttgttcactgcagagttgtgtagaggcctacggccaatcgcaggcaagccagctcccacagttggaatacgtgcgtggttagaagaaccgcgtcacgctgatcttcgcatcacgccctttggtgtacgcgcggtcgccgctcaaggccgggcggaagtttttgttgaacaggttgtccaccgtgaagttcacctcggtgcctttgaggtacgcctgctgcggtgtccatttggcgaacaggccctgggtgttgtagcgcttgttgccgtactggtcgtagaacagatcgccgatgctggagcctgggccgccggagtatttgtcgctgggcaggcggtcggtggcgccgatgaattggcccatccagcccacttgggcatcccaggccgggatgtgggtgcccagtaccagcacccatttggtcggcgggatgtcccgcgctgccacgtccgggccccaagggttggtgtaggcgccttggtgttggcccttggcataggcgaacgacaccgagccaaacaggtaggtggagttgtagatcgattcgagctcaacgcccttgatggtcaggctgccgatattgcggtagttggacatcggcccaggcgggcaagctgaagcgatgctgccgccgttgatggcctggttctggcagcctacgccggtggccttgaagatctcgtcttcgaccttgttgtggaacagggtggtgcgcagttgcaggttgtcgtcctgggcgatcaggttgtcgaagctggtgatgttgcccagggtgatggaggtgatgcgctccgggtccaggtcgacgctggtggcggtgcggctgcccacaccctgcacttcgtattgttcgtcgatcaccggggcgcgccaggtctggctccagttggcgaacagccccacattcggcgtcacggtccagaacagcgccaggcgtggcgaccagccggtgtaggtgcggtcgctgtagtcgtgacccactgccgggttggggttgttgtagtagggcgcatcgttgccttcgccgcggttgcgcacatggtcatagcgcagggacggtgtgatcgtcacatcgcccaacgtcaccgcgtcctggataaagaagctgttggtatcgactttgccgtggggcatgaagcccggctggaagtgcccgtagttgtagcgcggcgtgttgtagatggcgccgggcatccacatttcggtttcgcgggtgtgcttgcggatttgcccgccaaccgtcacggcatgctgcaaggggccggtgtcgaacaggctgacgttacggatatccaggagcttgtcggtgtaggcggtgtccatcttgcgcccgccagtggccaactggaaaaacgccgtggcgtcacgctcatcggtctgctcggtgttggactgggagtacttgatggtcaagtccaccagcgggttatccagcggctggtattcatatttgcccgaccaggtggtgtcgaccgtgtcacggtgggcgaggaagcgcttcaacgcgccttcgtagccgtagcggtcgatgttgaactgagtcggcggcgtggggtagctggcggcggaaaacggggtccagcggttgctgtgggagcgcgagtacgacagcccgacactgtgctcatcggtaaagtgtgcgttgaccttgaacagcttgccgtccacatcctgggcgctgttgggcaggcgctgggggttgatcgggtactcattgttgtcgttgggtaacttggcggccactttcatatcgccgccgtcgcgttgggtcaggtaggccagcgcatcgaaacggccgtcgtcggtacggccatacacggcactgctgtagacctgctcatggtcgttgctggagtagccatatttgagcatcgcaccgctgttgcggccgtccttgagcaggtccggggcgtccttggtgaccatgttgaccgtgccgccgaagccgccattaccggtgaaaggcgagttggggcctttttccacttcgatgcgcttgatcagctcgggctcgataaacaccgtgccttgctggtaacgctcaaagcccgtcttggtggcgccgtcgacggtcagcggtacatcttcggcatcgccgaaaccgcggatgttgatggtttggccaccgggtttcaaggagccgccctggctgacaccgggcaaggtctgcaacaggctggggatgttattggactggtagcggtcgatgtcggcctgggtcagggtggagcggttgacggtgctggcgttcacctcattgccggtgccgatcacgctcagggtgtccaactggattgcgccaccggtggtggttttacccgcatcggggcgcaccacgtaggtactgccgaccttgagcaggatgagttcgccgtttttgagcagggagcgaatggccacttccggggtgtagtcaccgttaagcgccggggcctgcacgttcttgagcagggtttcatcgaacagcagctggattttcgcctgctgggccacctggctcaaggatgtggccagcgactggcccggcaggtgcagcttgaacgactcggcttcggcgctgaggctcaaggccaggcacgtagccatgagtgtcggtcgaagaaacaggtgcgaagcgtggcaaggcgcgcgaaacatgaaatcccccggagcggctaaatagccaaaaaggtgtgcgtatcaaacacagacaggaggaagacggggcaggcaaaaaaaaccacacatgcgaatgcaaaatattctcatgtgtgatgttgcggcctatttgctcggctcgattctgatagtgccgtcagccgagagcacggttttcaccggcaacaacgcgggtaatgccttgagcagggcgtctgggtcattcacgtcaaggttgcccgataccttgagctgcgcgacggccttgctcacctgcaacgacgtctgcgggcggtacaggctcagctcgtcgatcaggctggccagttcgcggttgcgaaatgacaagtgcccgctgcgccaatcggcgacctcttcggcgttgagggtttgttgttgcacggtgcctttggcgtagttgtaggaggcgcgttgctgggcgccgagcagggtgacggggcttttgccatttggctcgaaagcgacctggccatgggcaacgctgaccaccaattgttgctgcccgcggcgcacatccaaagcagtgcccaccacccgtacgctcgactcgccggcttgcacgtaaagggggcgctccttgtcggcggccacttcgatatacagctggcccgtgtccaggtgcagcacccgatgatgggcgctgaagtccacgcggatatgggtgttggcattcacatacaaggtactgccatcgggcagagtcaacgtgcgcatgcccttggcttgggtggccacctggctgtgaaacagctcgcgcggcgcgccgatggaggtcgctaatacggcgcagagcacggcggcggccaccgccagggcagggcgccagaggctgggcttgcgcttgggcagtgccaacggtttgttcagttgttgcaattgggcgaggtcggcccacagctgttcgaattcggcataggcgcgcgcgtgcgcgggcaccgcttgccaggcggcaaaggctttacggtcggcgcggctgacttcgttgcggttgcgtgcaaaccaacaggcggcttgggcgtcgatgcaatcgctcgcttggctgtccagcgcgtcggtgtcgctcgggcggttcattctggctgctccgtgccggtgtcgggttgaaggcgtcgcttgcagtgcagcagggcaaaggcgatgtgcttttccaccatgctggtggagatgcccatgcgcgttgcgatctgtgcctggctcaagccttcgaagcggtgcagcataagggcttctcggcggcggggcgagagttcggcgaggacttctttcaactgttccaggcgttgcaggcgcagggcggcggccatggggtcgttgtgctcgtcggtgaccggctcggcatccatttcggcgtgatcagggtgggcggtttgccgtaccttctgtttgcgccagtgatcgcgcagcaggttgcgcgccatctggaacagaaacgcccgcggctgctcgaccttggcgcggtcgcggtagcccagccattgggtaaatacatcttgggccatgtccgccgcgtcgctggcgttgtccgtgcgtttacgcaggaaatacagaatgtctgcataaaacccgcgacaggcatcggccgacgacgggtcgggctggggacgagacatggatatccttcttgacgaagcacggcttggaaaagtcgtgaatgatatcgagaactattgtcatttgtctctgttaatgtgccctcttctgtaggagcgagcttgctcgcgaaaaaccaacaggcgacacgaactcccgatgtgctgcgttatcgttggcgttcttcgcgagcaagctcgctcctacaggggcgggggtttacttcagaagtgttttcagttgctcgatccctgcttcacccagagggaacaccggcaagcgcggattacccacctccaacccggtcaagcgcaacccggccttgatcgtcgccggcagcccgcctttgaggatgaattgcagcaatggcaactgtcggtagaacagctcgcgcgccttgttcaaatcatcggccagtacggcctgataaaggctcaggttcagttgcgggatcaggttcggcgcggcggtgcaccagcctttggcgccagccgcgaaggcttccagcgccagcgggttgcagccgttgtagaacggcacgtcactttgcagtttcaactggtgcatgcgctggatgtcgccagtgctctccttgaccattgtcacgttctcgacctgcttgaggatgcgcaggatcagctccaccgacatgtcggtgccgctggtggccgggttgttgtagagcatgatcggcacgccgatgctgtcgccgatggcggcgtagtgagcgaggatttccgcttcactgagtttccagtacgaggccggcagcaccatgaccacatcggcgccgtgttcttcggcgtagcgggcgcgacgcacggccttggcggtggtcaggtcggacacgctgacaatagtcggcacgcgcttggcgactttcttgatgctgtaggcactgacttcatcccactcggcatcgctcaggtaagcgccttcacccgtgctgcccaagggcgcaatggcgtggacgccgctgttgatcaagcggtcgatggaatgcccgagggcgtcgaggtcaacgcgttggccgtcggcgctgaagggggtgatggtgtagccgatgatgccgtgaatggttgggttggacatggggaaaactccggtcgaaaaaggggcaatcagttcaggcaatcggcgtgcttgcgcaggttttgccgggcgtagtagttgaacgcggcgccgtggcgcttgggcttggagatccagtcatgggcctcgcgccccagctccggcaggatcggtttgaccgtgcccgcagacatcgccagcaactgcaacttggcagcccgttcgatcaactgcgcaatcacgcaggcttcttcgatgttggcccccgtggacaactgcccgtggtgcgagagcaggatggcgcgcttgtcgcccagggccgtggtgatgatttccccttcttcattgcccaccggcacgccgggccaggcttgcaggaaagcgcagtcttcgtacagcgggcaaaggtccatgtgcgacacctgcagcggtacttccagcatcgacagcgcggcgatgtgcgtggggtgggtgtggatgatgcagtttacatccggtcgaccgcggtacacccaggtgtgaaaacggttggcggggttgggaatgccgtggccttccagcacctccaagtcttcgttgaccagcagcaggttgctggcggtgatttcgtcaaaacccaggcccaactgctgggtgtagtaggtgccgggcgccggcccacgtgcggtgatctgcccggccaggccggagtcgtggccgtactcgaacaggattcggcaggtcagcgccagcttttgccggtcggtccacgtattatctgccaggctgttttgcatctggctcagtgcttgcttgaccagttggtcttttgggagtgctaatgtcttggccatatcggtgtcctttgggtggttcaatggacgtcggatttgctggtcgcccgctgctcgcaaggtcgttgggtgaatgcaaatgacactaaagatgctatatgacactttgtgtcattggcaagcctgtctcatcgctttctgcatggattaaccgcagcaaatgtctatccgcttgaaaatattaagaaaaaaacttggcgtgaccctggaagccctggccgaaaaatccgggatgaccaagagttacctgtcgaaagtcgagcgcgggctcaatacgccttccatcgctgcggcgttgaaactggccaaggcattgaacgtgaaggtcgaagagctgttcagcgaagacaacgtcagcctcgacagctacagcctggtgcgcagccacgagcggcccgacacctcaccgggttatgcggtgctggctcatcaagtcagcgagcgcagcctgttgccgttcatcatctacccaccggcgcagttcaccgacaagaccttcaaggagcacctgggggaggagtttttattcgtgcatgaaggccaggttgaagtggatttcatgaacgagcgcgtgctgctggagcgcggcgatgcgctgcatttcaacgcgcagaaaccccaccggattcgctcggtgggagaggtgcaggcgcagttgctggtggtggtgcacagcgctgaggagtgagccttcttactcattgaaatgcagtcaatgtgggagctggcttgcctgcgatagcggtgtatcagtgccagatgggccaacagacaggccgctatcgcaggcaagccagctcccacattttgatcagcgttccacagggactgatagtgccggattgcccagcggatgcgtacgcgccgcaaagaacttcagcgttacgccactgccctcgaacagctccgaatatcgccgcttctgctgacgaataaacccatcactgcgccccgacaccgagatcgccagggtgctgatgctggcctggccaatagcatccaccaggtgtttatcctgcggccccaagtcatggccgaagatgcacagtgcgccttcatggctcaacagttgttcataacagaacgacagataatccgaactgcggatacttttgagcttctcctgcaccttgccttcactgacgaacagcggcacatcgtcgagggttttgatcgtgttattgattgcaaaactgctgagcagggtgctgtcagtggacggcaatttgcgcgccgtgccgtcaaggttgcgcaccaggtgcaagccgccgtgcaggtacaggatgcgggtgatgtcggtgcgcgtattgcgcaggtcgaagcttgagtcggtgctgcgaaacaggtcgtcgatgcccggtgcgtgcagggtcgcccagtagttgagcaagtcgtagttactggtgaagacggtggcgtaggtggccaattctgcgtggatcgtcgccagcgtcgacggctgcaccaggcgccagggaatgtgcacggtatggatggtggtgatcagcgcttccttgatcgcgtagtagcggttacgcggtgccgccgaactgaccgccagggccttgttgacccggctggtggttttcaaggcgcccagagcttgctcgaaactgcgggtttgcaaggcgtcgaacacgctgagttcggaggggctcaggggcttttcttcgacggtacgggcgttttcgaacagcgagtcgtaggcgaagtcttcccagatcgtgcggctggcgccgttaccgatcagaatcccgctgaagtcgacggcagcgcgcagggcactccagtcttcaaggtgggcgtcaatatcctggaaatccttcattgcggcgggtctactcgaaatcggctggggggtgactttatcacgagccggcattgatcctgatcaagatgcgccacgcggtacaggttgattctgtcggcataaagcctttgaggatcgatcatgagcagcacgtttttcatccccgccgtcaacatcatgggcattgattgcctcgacgaagcgatgaccgccattcgcaactacggctttggcaaggcgttgatcgtcaccgacgtcggcctggccaaagccggtgtggctggcatgatcgccgagaagctggcgatgcaggatatcgactcggtgatctacgacggcgccaagcccaaccccagcgtggaaaacgtcgaaaaaggcctggcattgctgcaacagagcgcctgcgatttcgtggtgtccctgggcggcggttcgccccatgactgcgccaagggcatcgcactgtgcgccactaacggtgggcgtatcggcgactacgaaggcgtcgaccaatcgagtaagccacaactgccgctggtggccatcaacaccaccgctggcacggccagcgagatgacgcgtttttgcatcatcaccgacgaaagccgccacgtaaaaatggccatcgtcgaccgcaatgtcacgccgttgctgtcggtcaacgacccggccctgatggtcggcatgcccaagggcctcaccgccgccacgggcatggacgcactgacccacgccatcgaagcctacgtgtccaccgccgcaacaccgatcaccgacgcctgcgcgatcaaggccatcgaattgatcagcgccaacctgcgcctggcggtccgcgacggcactgacacggctgcacgggagaacatggcctatgcacaattcctcgccggcatggccttcaacaatgcgtccctgggttttgtgcatgccatggcccaccaattgggcggcttgtacgacctgccccacggtgtgtgcaacgcggtgttgttgcctcacgtacaaagcttcaacgccagtgtctgcgccaaacgcttgagcgacgtgggccgggctcttggtgcggatatcaagggcattaccgctgaagagggcgcccaggccgcgattgcggcgattcgtcggttgtcccaagacgtggaaattcctgctggtttgcgtgagcttggcgctaagttgcaggacattccgttgctggccagcaatgcgctgaaggatgcctgcgggctgactaaccctcggcgggcggatcagcgtcagattgaggagatctttcgtagcgctttttgataggcataggtacctacacaacgttggcgcgaggctgggcttgtggcgagggagcttgctcccgtgactgcctgacagccgatgcttatccgcgatcaaactgtgtggggcttgcctgcgaagacggcccaacggccgacaccaatctacctgacaccccgcaatccaactgtgggagcgggcttgctcgcgaaggcggcctggcagtcaacacagttggattgggtacatatccattgctgcggtaacggccgcttagggttccgccctgacggcggctcacttttgaacagcgcaaaagtaagcaaaacgctcttgccccaccactcggcacctcgcttaggctcggtnnnnnnnnnnnnnnnnnnnnnnnnnnnnnnnnnnnnnnnngctcttgccccaccactcggcacctcgcttaggctcggtgtgcccgtaatccgccagtgatttggggggccgccgccacgcgccatccatggcgcggggcggctaaaccggcatccctgccggtttaccccccaaatccctgtcgaattccggccagcgtggtttgacggggcgcttaagatcaagatcaagatcaaaagcagatcaagatcaagggcggctcgcttcgcatcgtggttaccgtcggctgcgacaacttacaaagttgtgtagttttgataggcgcagcctccagcggcacgcgttaagctacacgcctaatgcattcaagcatcaagcgtgcggcgtgccgctgaggtcctttcatgagagttctgttattcggcgccaccggcatggtgggccagggtgtgctgcgcgagtgcctgctggcgcctgatgtgcaggaagtggtggccgtgggccgcacgcccttgacccaggagcacggcaagctgcaccaggtgttgcacagcgacatgctggatttccaacccctggaaaacctgttgcaaggttttgatgcgtgcttcttctgcctgggtgtttcgtcggcgggcatgaaagaagcgcgctatacccacctcacctatgacctgaccctggtggcggccagtaccctggcgcggctcaatccgcagatggcctttatctatgtgtccggcgctggcacggacagctccgaagccggcaagtcgatgtgggcgcgggtcaagggcaagaccgaaaatgccttgctgcgcctgccgttcaaggcggtgtatctgttccgtccggggatcatccagccgttgcacggcgtacgttcgaagacgccgttgtatcaatctttctacagcgtgctcgggccggtgctttcgtttgtgcggcgactaaagccggactgggtggtgagcaccgagacggtcggccgtgcgatgttgcaggcggccagccagggcgcgccgcagccggtggtggagcaggcgcagatcaatcgcctggcggctgagcgccgctgaactgaatcaatgccacgccgccgatcagcagcaatgcgcccagtacccgcgaggttgtcagttggcgttccaccaggccgaacaggccgaaatggtccagtagcaacgaggcgagaatctgcccggccatggccagcgcaatgaagcctgatgcgccgagcttgggcagcagcatcaacgccaatgaaatgaaacacacgccaaaggcaccgccggcccacatccacaacggtgccttgctgataaaggccaggctcggcagaggcaaacgcagcgccacaatcaccggcagcagcacgatgatgcttaccagcaacgacgccaaggtggcccacaaaggatggcccagcccgcgcccgaggttggcgttgatcgcactttgaaacggcaccactgcaccggcgaacaccgccagcgccaacaaacctacccaatgcaacaccgtcatctcgacgctcccagaagttttgctggactctaggttattcgtcgagcaaatttaaattccaaattcttatgctgggcatgcagctgatgaatgatctgcgccgcatcgaccttaacctgttggtggtcctcgacgccttgctcagcgagcagcacgtcacccgcgccgccgagcgcctgcacctgagccagccggcggtcagccatgcgttggcgcggctgcgcgatatgctgggcgacccgctgctgatgcgtcagggcggcacgctggtgccaaccgcgcgcgccttggagttggcggcacccttggccgaaaccctggcgcaggtgcaggccttattgacgccgaatcgttttgatcccacttctgccaaacgccgctttcgcgtggcgatgtcggattacagcgcagcgattttcctacccggcctggttcgcgtcctacgccaggaagcgcccggtatcgacttgcagatcatccaggccagccgcgaaggcatggtcgacggtgtgctcaatggcgacctcgacctggtggcaggtgtatttcccgacatgcccgccgaactgcgcaccacgccgctgttcgaagagcattacacctgcctggtcgaccgcgacagccttgcgccaagtggggtgctggacctgccgggctacctgtcgcgcccccatgtactgctggagatgcgcggcagcggcacaccggaaatcgaacgggcactgacggccattcgtgaacgccgccatgtggcgatcagcctgccgcattggggggtggcgccgcagttgatccagggcacggatttgattctgacggtgtcgtcccggggtttattgaatatcgacgctcggcaattgctggccgtgccaccgccctttcatatcccgtcgtttgcctttgagctggcctggcatacgcggcggggtggggatgcagggttgcagtggttgattgagcgggtggtggggctggttgattaggctcctgttaccaggctttcggaggttgacgacgtgtatgaaaaatccgcattacttgtagtcgcccctctcgaattcggtaaggaacaatgtagggccatcgggatacaacccactcgcgagtccccggcactcgtccctctttccccatcgcgggaaacgcggcgacctgttccagaccacttagaattgccaggacaaattcatgggctgctttggggttttcttcggcagtataagccgcttcatcgtcaagatttctgagggctgccctcagccactcaacctgcattggcgcgccatttatcagcgaccgcctttacctcggcagccgtggcgaaatcccccgcatccgcttctttcacggctttctggatttcttcgatttgccaggcttcgcgggccaggtattcgcgtaatgcgtcaacggccagaaaggatttgctgcgaccggtagccttggcgagactggcgagggtatcggcgacgtcttccggtatacgtagggacataacagacatatgaacctcgatgtagtgatgtgtagtgcaacatactacatcgtcattaccgccacggtttgccccgctcgtcaggcgtatgacgatcaaggagaacagtcatgctttctggattcaaccacctgaccctggccgtcaccgatgtgccgcgcagcgtcagtttctatcacgacctgctgcgcctgcagctcgacgcaacctgggaccacggtgcctacctctcactgcctgggctttggctgtgcctgtcgctggacccgttgcgttcgactactgcggcggtggattacacccactatgccttcactgtcgatgctgccgatttcactgccttggtcgaacgcctgcgtgctgccggcgtacgggagtggcgagacaaccgcagcgaaggcgcatcgttttatttcctcgatcccgacggccacaagctggaggcccatgtcggcgatttggcctcgcgcctgcaagcctgtcgtgccaagccctatgctggaatgaagttttacccgtcgcggtgaagcatgcagaatcaatcaccttttagcgtctgtcggagcgtctatccatgactccatccttgctgttcgccgtgctggcttcgggttttatctacggcattacccctggccccggtgtcctggccgtattcggcatcggtgcggcccgtggccggcgtgccggggcaggattcttgtgcggtcatttgctcggcgatgtggtgtggtgcagcacggcgctgatagccatcgtcggtgcgcgggaagtcggcagcagtgcctttgatgtgctcggcgtactcagcggggtgtatttgttctggctcggctggcgtgcgatccgcacccaacgccgcaacagcgatgcccctcagggcgcggcgcgtcatccgttctggcacggcattctgtttggcttgaccaaccccaaggcgtatccggtggccgtggcgaccttcactgcgttgctgtccagccgggccgagctgttgacttggtcgatgctgccgaccttgattctgctgagctttatcggtggcttgctggcctacgcgatcctgatcggtgtggtgggcgcccaacgggtgcggacgctgtatcaacgccacgaaattctcatcaccagactctgcggcgtgatgtttatcggcttcgccctcaatgccctggcgcacgcattgccgggcctgtttggcagcaaaccggcctgaggcgacgactgccgttcgtcgcacagggaagttttttctaaacctttgccgccctgaaaattccaattcagggcgaggagtatactcccgcgcctatttttgccctggaggaacccatcatgagccgcatggctatccggttacgcaccgccagtttcgcgatgctgctgggcctcggcgccagcaatgctttcgcccagtcgcctgcagaattcatcgagcaggcttcggccaaaggcatggccgatatcgaaaccagccgcatggcccacgccaagacctcgtcccaagagatcaaggactacaccatcgaggtcatcaacgagcgcaccctggccaaccagcacttggcggcgattgccaagaagcttgatttgcctgtggccccacgggagaagatcgttgataaggccgaaaccctgatgcctgaactcaaggacggcgattcgtttgacgctgcctataccgcgcagcaggtcaaggagaacgaagatgccatcgccctgttccagaaagaaggtgcggcgtcggatgtaccagagataaaagcgttggtggatgagacgctgcccaagcttgaagagcgcctgcaaaaagcccgggccctggcctcgacctacggcaagggccatcaaggcgacggttgaggctgctgcctgatatgaaaaacggcggttggagagaatccagccgccgttttttatgccgagttcaggcccgttctggacgcggcttgttcaatgtagcgctataacgccagttccccctgaccggtgccttccagcgccaataaatactgcttggccgccagcccgcccgcgaaaccggtcaagccgccagaagcaccaatcacccggtggcagggcgcaatgattgagatggggttgcgcccattcgccgcgccgacagcgcgcacggctttggggttgccgatctgctcggcgatctggctgtagctgcgggtttcgccgaaggggatggtcagcagtgcctgccagacctgcttttggaagtcagtgcccgtgaagtccagctccagctcgaactggttacgtgttccggcaaagtattccttcaattggcgttcggtttctcgcagcaccgggctgtcgttggcctcgatcaattcacccaggcgtacgcgattcgcacgttccacttcccagaggatggcgctgagtttgccatcgcgcgccaccagggtgagctcaccgacgggggaaggcatgagcttgtagtggtaagtcatcggcaggctccttgaaggggcgtgaagggggacgacgtcactgtagttccatcagagtgcctggaaactacgtttcttgcggtcaaattttgcgctcgtctagaaattccagtaaacccaatcggcgtagtaggggtaacagtaaagccacgagattatgtagagcgccttcagcgcagatgcagtgcttagcatgaacgcagaaatgatattgagcagggtgataatcaaagccaatactgccacgcggcggctcgcatgacgccaggccaggctcaccccgtaagccgacgcggcaatcacgcctatttccaagagtaatccgagaggaaagggcagccttgcaaacgaggccagcagtggcaacaccaacacccagccgacgacttggcgcaggatgatcttgggtgtgtttttttgggtgtccagcattgccatgtgtccgaactcttggccgatgagcctacatcatcgcggggtgttgccgtccttgccgtaagattttgtttaggcgtaactaccgttcctgttgcaataccttgagcgcagcggacgccaggaatcccgagcggcttttttcctgtggatgattcaacacgtactcatcgatgcgattcaacagatagccgggcagggtgatgttgagcttttgagctttgcccagatatttggtcacgtcgatgtccaccacagcccacgtgcaaccggtgtactgagggttggcggcgtgcacggtgactttttgcgcgctggggatcggcgcgccatcttctgcgaggatctcgaagtgcccttcgatggcttcgcgggccatggccatggcatcgtccagatcatcgccggctgaataacagccaggaatatccgggacttccacgccccaggcgtggtccgcgtcgcccgttgaaattgcgatggggtaaagcatgctcttgccctccagggacggttagctcagcagagcctgtttcaaaatgctcttggcggttttatccagcaggtcctttttggggtgagggatcgtcacgagccccggctttgtcgggtgcttgaagtgatgatggctacctcggatgcgcaccagataccaaccgtctgcaacgatgtgtcctatcaaataccggctatccacatcacctccttgtggtgtgtgttggtggagactataaccactgctataaaattatcaacactctacctaccaacggttgatgtccgagatttcgataggtgttgaatgaagtgtatgggcgcacagaaatggcgccgcttggaggtattacgaggtgcttcacgccctcaggctcgactgccgagcagcagatgagcgctggaggctaaattattggtataaaaaaaccggtcaccaaggaccggttttttgtgcatcctgcgccagaaccctcctgacgcaagtgcaaatctgagtggagcgggtagagggaatcgaaccctcaactaaagcttgggaagctttcgttttgccactaaactatacccgctcagagcggctgactttgtaccagatgttcggctggatttgaagtttttctttgaaaaatgtgagagttgcgtgtggcgagcaagcttgctcgccacagtgtcaggcttgatttcaaagcgcccatgcatgctgcgcctggccctggctatatcgcaacgggctggcgggccgctgccctttcaagaagcccaccacggcctcacggctatcgcggcatgcggctttatgttccatgtccaagaagtgtcccgtcgcctggatagtgctgaagctgctcttggcgacatgctggccaaacagcttggcgtcgtctgcgctggtgtattcgtcccattctccgttcaagaacagcaccggaatgtcgatctgtctggcggccttgaggtagcactgccggtcgctgttgagcacgtggctgatgtgaaaatgcatctgcccatattcgtgtgcggccaggctgctgacatggcggtagttgaagcgcttgaacagcgacggcaggtgcttgccgagggtgctgttgaccaggtggccgacacggtcgcggtcgaggttgcccaggtagtcgacgccacgttcgaggtagtcacgcatgggcgcattgatcaccggcgagaatgagctgatcacggctttttccacccgacggggtcgctgggcgagggcaaccaacgtggctgcgccgccccaggagaaggacaacacgtgttcagcggcgaagtggtcgagcagttccaggaggatctggccttcgacttccttggtcagcatgtgctcatgacggttgtggattttggaacggccagcgtagggctggtcgtacaacaccacattgaattgcgggtacaggcttttcacggtttgagcgaaggacgctgtggtcgccatggagccgttaaccaggacgatggtcttggccgctgcgtccgcgcgatagaactccgtgtacacccgaaactgaccctgtatatccagcacagcgatttctggcctcatgtcgtaagactcctggcaagcgggtagtgcgcgcagatcactctgcacgagctttatgacaggtaggcatacgcctggaaaatgagggcccatgtcggtccgatgacggctggccggcgggtgttgttatggcgggcggtttgccgggaaggcccgggtatcaagcgcgggcgaggcaaggtgtttcttggaggttatagggcgactcgtcagtcatcatctggctgaagccttgattcaagcagcaccgaaagcaggtcgcaaggcaagcggctggttttttgccatcaccggctgaacggtcgtcagacttgtcggatttcgtcgtcagtcagtggccgatactgacccggcgcaagcgacgtatccagcaccaagggccccattcgctcgcggtgcaggccggtcaccttgttatcaaaatgcccgaacatgcgcttcacctgatgatagcggccttcgatgatgctcaaccgggccgttctggggctcagcagttcaagttcggcaggttgggtagtgagatcttcaaaagcgaaatacacgcctgccgcgaacgtctgtgcgtactgcgggccgatgtcctgttcggtttgcacatggtaaaccttgggcaacttggtctgcggttgcgtgagacgccgtgaccattggccgtcgttggtgatcagcatcaggccggtggtgttgaaatccaggcgcccggcgatatgcaggtcggctttgtctggttcgtccagcaggtccaggaccgtggggtgttgcgggtctgatgtggcgctgacgcaaccctgaggtttgtgcagcatgaaataacgcgccggcttgcccgcttgcaggatttcaccgtccacgcagacctggctgaattcacgtacgtgatggtgcggatcgctgactgcaacaccctcgacggttacccggcgctccgccagcaacaggcgcacttgcttgcgattgaactgtggcaggttgctgaggaagcgatcaacgcgcatggcggttacgcaactgttcgtccacttgggcgcagcgtgggcacaggcaggctttattgcgcaactcatccggcagggcttcaagcaccgccgggttgatgatgacgctgtagcaccagcaggcctggtcgacggtacgcgggtcggccagggagcagtcgttgcgggcaccgcaggcggggcagagggtcggtgtggtcatgggtcggttcagaagggaatcgggtagggcgcgttagttattgcacgatacagcgcggctgcgcggcattccatcaccatggctttttggcgaggcttcacttcgtctgaaacagatgtttccacttgtgtcgcgaacgcaccagattcggtttttgatgtcagatgtttcgtcattcagtgaaggctgaatgccgctcgccagcgtcgctggaggagctcttccgcggtccaggaggccgccatgtatcgacgactgctgcttatcgctttgctcggcctgaccctttcagcctgcgtgccctactacgatggaggcgctacctactatcgctccgaggtctacaccgcaccggcgccagcctactactacggcggcccgcgttattacccttctgggcgcagctattacgcgccagcgcctcgctactatgcgccgcagcctcgctactattcggcgccgcgctactaccaaccggccccgcgctattaccctcgcgccggctaccggccctacccaaatcaggggtggggcgaccgctggggcaatggcgggcgtggacgtggttccgaccacggaggtggccgcggcggtcaccgttaaatatcttgaaaaacaagcggcgcatcatgcgccgttttttataggtaccgtatgtccgtactgtcagatttaacagctatctttgaggcgctagctgtacttcactaacgagaagccttgtgcttttgcgtggtgagactgagcagatggaatccctatgttcaaacaattgatttgcgtgctcctgctgatgagcggcttcattgcatcggcaagagcggagcagggctgtccttatacgacgcagatcgtgtacgccgatggccattatcgcgcccaggacaatggcctgcgctggcaaagtccgaaggtagcgtcgcgtggtgttgtcgacgggttcattggcgcagtcttcatgccgggcgacggcgaggagagaggaaacggctacatggacaagtgcatctaccgcaccagctggaacggggtagtagtgttgaggccaagcaggggcaatgagattatcaacatgtcgttgaccagctccttgtattggaagctgcagcccgatgcgttcgagttgccggtgtatacgtgcgtggacagccaaccggacaattgcgcgttcaaggtcaacgacaaacgtacagacctgtcagtagtcagataaatctgccagaggattcctaccttcccaagccttgtcaaagtgcgcttgcaccactgcatccggcagtgtgttgatatccggccagtgccaatgaggcgtctggtctttgtcgatcaggcgcgcccgaacgccttcggcgaactccggatgacggcagcagttgaggctcagggtgtattccatctcgaacacctgggccagggataggtggcgcgcgcgctggagctgttcccacaccagatgcgccgtcagcgggcagccctcgctgagggttttgccggcgcggttcaatagcgggtcgctgtggtcgcgcagcaggctcaaggcacgccaggcacagcgtacatctccgacatccagccattcgtcgatttgtgcgcggcgcggtagccattgcgcttcgggttgatcgctgaccgcctcctggcccagggcctttagcaggctgttgagttgcatcgcgctctgttcctgccagttcagttgcaacaggccatcgagcaattcgtcttgctggtcatcgcgcaggaagcgatcggccaggcccaagtccagcgcgtcacgaccgttgatatgggcgccggtgaggcccaggaacaggccgagtttgcctggcaggcgggacaggaaccaactggcccccacatccgggtacaagccaatgctgatctcgggcatggccaaacgactgctcggcgtaacgatacgcacggcggcgctttgcaacaggcccatgccaccgcccaatacataaccgtggccccagcagatcaacggtttggggtaggtgtgcaggcggtagtcaagacgatattcagcggcaaaaaactgcgcggccagagccggaacttcgccgggctgctcacggcatgcctgggccaggctgcgcacttcgccaccggcgcaaaaggctttggggccgttgccgcgcagcagcacgcagacgatctgcgggtctttggcccaagcctccatgcgctcatccagggccaggatcatcggcagggagagggcattgagggactttggcgcgtccaggctggcgatgccgatgcgagcgccgccactgccggtcagttcttcgaaatgcaggttcatcgtgacctcaatcgagaaggtgaaggatgagtatgatcccttcgtgggaaagtgccggtgctgtgtcagatcaattgacaagcggggtaggctttcctagggttcgcctcattcttttttacaagacaattgaactatgaccgatggcgaccgtatcaaactcgaacccagctggaaacacgccctgcgcgatgagttcgagaagccctacatggcgcaattgcgcgagtttctgcgccaggaacatgccgctggcaaagagatctacccgcccggcccgttgattttcaatgcccttaattccacgcccctggacaaggtcaaggtggtgatcctcggccaagacccctaccacggccctggccaggcccacggcctgtgcttctcggtacaaccgggcgtgccggcgccgccgtcgctggtcaatatctataaagagctcaagcgcgacctgaacatcgacatccccaaccacggttacctgcaaagctgggccgaccagggcgtgctgatgctcaacaccaccatgaccgtggagcgcgccaacgccaacgcccatgcgggtaagggctggcagttttttaccgatcgaatcatcgaagtggtcagcgagcatcagccgcacttggtgttcctgctgtggggcgcccatgctcaaagcaagcagaagctcatcgatgccaccaagcatctggtgctgacgtcggtgcatccgtcaccgttgtcggcgtatcgtgggtttctgggctgcgggcatttcagccggaccaacaagttccttgagcagaatggcgaggcccccatcgagtggcgtttgccaccggtctgaggcctggcacattcagaatgtgggagggtttagagaggggctggctgacggttccagtgccgaaacaaaggctcggccaaaaatagcacgaacaacaggcgcatcacctgcatcgccgtcaccaagggcaccgacagctgcagggtttcagccgtcaggctcatctcagcgataccgcctggcatcatgcccagggtcagtgatcgcaggtcgaggtgagtgagggcgctcaagcccaccgccgccaatgtcgccagcagcatggtcaatgccgtgccaatcaaggtgcggcccatgaacgacggtgcccgacgaaagaactgccgattgaagtggcaacccaaaccgctgccgatcaaccattggccgatctggctgccgccgtctggcaggccgatgtgcaaatcccaggtcacgctcgccaccgcactcaccagcaatggtccgaacaaccaggggttgggttggcgcaagcgttgccagccccaggcgaccagcgcacccaccggaaacagcagggccagccaggcccagtctacgggcgccggatgaaactgcggcgcgccgcctccgagcaaatacttgaagatcgccggcacacacagcaccaccaccagcactcgcaggctttgcccggccgcaacccggctgagcaccgcgccattgcgggcgccgaggttgaccatctcgccggaaccgcccggcatgctggagaaaaacgccgtggcacggtcttcaccgctgcggcgcatcaaccacacgcccaccacgctcgacaagctggtgaccagtgcgccgaagaagatcaggccgaaatggctcatcacctgctcgatcaccaccggggtgaagtgcaggccgatgccgatgcccaccacccattggccgcatttgcgcccgccgggaatctccgccaactgccagggcgtgaggcaccgcaccaggatgatcgccagcaacgagccgaccatgtacggcaaaggccagcccaccaggctggccaggtaaccgccggccaggccgaccagcggtgttccccaccaatgtttaaaggtgacctcagacatcggccagggcacgacgctgttgcacgcgtttacgccagatacgcagcagcggtacaagcagcatgattgcggtgagtacccagacgccaaaggtgatcgggctcgaccacaggatttccagcgcaccgttggagatcgacagcgcacggcgcaggttctgctccatcaggccgccgaggataaagcccagcagcagcggcgacagcgggaagtccagcttgcgcaggatgtagccgaagatgccgatggcgatcatcaggaacagatcgaaggtggtggcatgcacggcgtacacgccaatcgcggtgatgatggcgatcaccggcaccagcgcccagttcggcacggcgaggatacgggtgaagatgcggatcatcgggatgttgagcaccaccagcatgatgttggcaatgaacaacgacgcgatcaggccccacacaatgtccggttgctgttggaacagcagcgggccaggagtgatgttgtacagcgacagggcgccgatcatcaccgctgtggtgcccgagcccggaacaccgagggtcagcatcggtaccatggcgccgcaaaccgatgcgccaatcgcggtttcaggggcggccaggccgcgcatgtcgccttggccgaacttgccgctcgcgcctgcgatgcgtttctcggtcatgtaggcaacggccgacgccatggtcgcaccggcacccggcaacacgccgatgataaagcccgacacaccgcaacgcaggttcacggtgagtaccgacaaggcttccttggcgttgaacatcatgcgcccggtggctttcactgcttcctggccacggtgggttttttccagcagcagcagaatctcgctgatggagaacagccccagtaccagcaccacgaactggatgccgtcggtcaggtgaatattgtcgccggtaaagcggtacacaccgctgttggcgtcgatgcccacgcaggaaaggaacaagccgatcagcgccgcaacaaaagtcttcagcggtttgtcaccggccatgccgcccaggcagacaatcgcaaacaccatcaatacgaagtattccgccgggccgaacgcaatcgcccacttggccagcagcggggcgaacagcaccatgccgcaggtggcgataaacgcgccgatgaacgaactccaggccgacaacgacagtgccacgccagccaggcctttgcgggccatcgggtaaccgtcgagggtggtcatcacggtggacgcttcgcccgggatgttcagcagaatcgaactgatgcggccaccgtattcgcagcccaggtacacggctgccagcaggatcagcgccgactcgggcggcaagcccagggcgaaggcgatggggatcaacagcgccactccgttgatcgggcccaggcccggcaacaggccgaccacggtgccgatcaaggtgccgcacaacgcggtcaccaggttataggggctcagcgcaacgccgaaaccctggcccaaatagccaaaagtatccatatcagttctccagaacgtcgagcaggccgaggggcaacggtacgtccatggttttatcgaacagcagataaagaccgacgctcatcaaggtgatgatcaccacgctgggcaaccagcggccgccatacagccgtgccatcggaataccgatcagcatgctgctgagaatgaagcccaaggattcgaacgtgccggcaaacaccagcagcagggccacacagatgccgatcttgatcaacgtgggttggtccagtgcgggttcatcgtcggtgtgtttggtcgcctgcgggcgaatcatcatgtagatgagcgccaggcccatcagcccgagcagcagcagggggaaggccctgggccccacgggttcgtaggaaaaggccgcctgatatggccaggccatcagtgccaggccgatacaggccagtaacagcaccgcggcaaaaatgcgttgtaagagcatagaaaactccaaggcccctcttgtaggagcgagcttgctcgcgaaaaacgtcaacgatgacgccggccatcctggatgcacacggtgtacttgcgttcttcgcgagcaagctcgctcctacaggggcattacacaaaaagaggggcgattactggatcaggccgaactctttggccagcactttgtagtcagccacctgcttcttcacgtaggtgtccagctcctggccggtcatggcaaacgggaacagctcgcgctggtcacgcagcttggcgaactcctcggaagccagcagtttgtcgaaggcggctttccaccaggcgtagtcttcatcgctgacctttggccccaggtagaagccacgcaccaccggccagacgatgtcgtagccttgctctttggcggtcggaatatccttcatttccggctcatccaggcgcttctcggagaacaccgccagcaggcgcatgtcgccgctctggatatgcggcatggagtcggagatgtcggtactgcccacttggatgtgaccacccagcaaggctgtggcgatttcaccgccgccctcaagggcgacgtaacgcagctcgcgcgggttgatcccggcggccttggcaatcagtgcggtttgcatccagtcctggctgccgacggtgccgccggagccgatcaccacgctgcctgggtctttcttcagggctttgaccaggtcgtcgagggtcttgtagggcgaatcgcttttcaccgcgatggcgccatagctggtgcccactgccgccaaccagcgcacggcgctttcatcaaaacggccgaacttgccctgggccaggttcagcagcgaaccgctcgaccaggcgaccagagtaccggcgtccgcagggcgctgggcgaccactgcgttgtaggccactgcgcccacgccgccgggcatgtaggtcacacgcatcggtttggtcagcagcttttggtttaccagcgcgctttgcgccagcttgcaggtcaggtcaaaaccaccgccaggggaggccggggcgatgcattccggacgcttgggttcgtcggcggccagcagttggccggcgaacagcatgcagccggcggcgagggcaaatttacgcagtgaaagggtcatggtgatctccatcgttgttgttatgaggggggtattaccaaagtgcgacgctgtagctgaccagcaagcgcatttcatctgcgtcacgggccgaatagttggagcgataggtggcgttacgcaggcgcacggccacatctttgaacgtgccgctttgcaccacgtacttgatctcgctgttgcgttcccactccttgccggtctcgccattcttgagcttgatgttgtcacccgagaggtaacggctcatgaaactcaagcccggaatgcccagcttggcgaaatcgtagtcgtaacgtgcctgccaggagcgttcttcggcgccggcaaaatcgttgatctgcacgaagttgaccaggtacgggtcactgccatccacatacgggaaggcgctgtcgccggacatgtgctggtagccggcgctgagcttgtggccattgagggcatagctgaacaggccgttgagggatttgttatcgatattgccgccgcgcgctgagccggtgtcatcactgatggctaggcgcaggtcggcggcgaaggtgccagggcccatcgggcgggatgcgaccatgccgaggaagtgctggcgatacacgtcgtcaagttgggcgaagtggtagctgccggtgaccttttcggcgaacttgtagtccacgccaccaaagttgaagtgcttgccggtggcaccgctgaggaagcggctgttcttgttattgagcgcgatgtcttcgtagttggtgtcgtcgcggtccttggctttgtccaggcggccaccggtgaacaccaggttcttgaattccttggaagtgatcaagccaccgttgaaggtctgcggcaggatgcgcccgtcgttgggcttgaggatcggcagttcggggatcagcgagccgatcttaagctcagtggcggagattttcactttgccggtcaggcccagcttggagtactcgttggcggcgcggccgtcatcgtgggtcggcagcaggccggtgccggtgcggtcggggctggagtcgagcttgacgccgagcatgcccagcgcatccacgccaaagccgacggtgccgtcggtgtagcccgattgcacattgagcatgaagccttgtgcccattcgtcgcgcttggattgctgcgcactggtaccgtcgcgaaagtcgcggttgaagtacatgttgcgggtttccagggtcgcgctactgtcttcgaagaaggcagcctggctgagcggcgtaaagccggcaagggcggcggcactggcgagggcggtatgggtcaggcgggaagagcgaacaggcgcgcaagcctgtggctgggtcgacagcatcgtggtgtactccgttattgttcttattttggcgaaaacgcttcgaggcgtttttcgggcgctacgggtcaggcaactcggcgggcatagaccaccgtgtttagatcctaaagggcgaagctttcactaacctttcaatcgcctttcaatgttttcgggcttcacaggccaggttgcggctgtaaactgccgggcaaagcgtggcgccgaccacccctgaatgaggtagaaatccatgcgtgtcctgttggttgaagaccatctgcagctcgccgaaagtgtcgcccaagcgctcaagagcatgggtttgaccgttgatgtgttgcatgacggcgtggcggcggacctggccttgagcagcgaggaatacgccgcggtgatcctggacgtagggttgccgcgcctggatggcttcgaggtgctcgcgcgtttgcgggcacgtggaaaaaacctgccggtgctgatgctgactgctcgcagtgatgtaaaagaccgcgtgcacggcctgaacctgggcgccgatgactacctggccaagccgtttgaactctcggagcttgaagcacgggtcaaggcactgttgcggcgcagcgtgttgggcggcgagcgccagcagacctgcggtgtactggtgtacgacctcgacacccggcgcttcacggtcgcaggcgaactgatgaccttgacctcccgagagcaagcggtgctcgaagccttgattgcccggccgggtcgcgtgatgagcaaggaacaattggcttcccaggtatttggcctggacgaggaggccagccctgacgccatcgaaatttacgtgcatcgcctgcgcaagaagctcgatggccagcccatcgccattgttaccttccgtggccttggctacttgctggaagcccgtgatgcataagcccagcagcctgcgctggcgcttgctgtgcaacctggcgctgttgctggtgctgttgatgctcgccagcggcatgagcgcttattggaacggtcgcgaagctgccgacaccgcctatgaccgcacgctgctggcctcggcgcgcaccattgccgccggcttgacccaggtggacggcaccctcagcgccaatgtgccttatgtagccctggacacctttgcctacgacagtgccgggcgcatttattatcaggtcaatgacattgatcagaagctgatttccggttacgaaaacctgcccggcccgccgcccggcacgccccgcaccgacgattacccagccttggcgcggttctacaacgccatgtacctgggccagcacgtacgggtggtgagcctgctcaaggccgtctcggagccgaacatgaatggcatggccgaaattcgtgtcgcggagaccgacgaagcgcgggtggccatggcccgcagcctgatggctgacaccctgctgcgcctgggcatgctcgccatcggcgcattgttgctggtgtggttcgcggtaagcgccgccctgcgcccgctggaacgcctgcgcacggcggtggaagagcgccagcccgatgacctgcggcccctgcctttggtggaagttcaggacgagttcggcccactggtgcgctcgctcaaccatttcaccgaacgcctgcgcgggcagttcgagcgtcaggcgcagtttattgccgatgctgcccacgaactgcgcacacccctggcggcgctcaaggccaggctggaactgggcctgcgtgccgaagaaccggccacctggcgcagcaccctggaaacggccgcccagggcaccgaccgcttgacgcacctggccaatcaattgttgtccctggcccgcatcgaaaacggtgcccgggccattgccgaaggtggtgcgcagttgctcgatttaagccagttggcccgtgagctcggtatggccatggcgccgctggcccacgcgcggggcgtggcgctggcgctggaggccgatgagccggtatggctgcgtggcgaaccgacgctgctcaatgagctgctgagcaacctggtggacaacgccttggcccatacgccacccggcggcaatgtgattctgcgggtgacggccccggcggtgctggaggtggaagatgacggccccggtatcccgctggatgagcgggaccgggtgttcgagcgcttttatcgacgcagccagcagggcatgggctcgggcttggggttggcgattgtcggggagatttgccgtgcgcacctggcgcagatcagcctgcatgatggcgagctggcggggcttaaggtacgcgtgagttttatcgcgggttgatcagtaaaacatcgagcgggcttcgtccagttcgctgcgcagggcgtcgctgtgcaggtctatgcgtaacttcatgagagccggcaatgtggcaagcggcacggtgcccaggggatggtcggtgccgcggtggcagtacagcgcggcgacttgcaccaggtcgacgtaatccaggctggcagagtcgcgtgtcaggtccaggtattggcccggcacgttcaccagcatctcggggaagtcccacacccgtagcagcttgtcccccagcaccgggtgaatgctgtcgatgacgtggttgaggctgacggggtcggccagcagctcataatggtcctcggcatacgtgaggatcggcagcacgccgatctgatgcaccaggccgcccagcgccgcctggtccggcttgagctggctgtggcgacggcacaaggcgtagctcacgcccgccacctccaggctgcggcgccacacgtcgcgcattttctgttcgaccacctcggagcgggcgtgaaagatctgctccatcaccaggccgatagccaggttgctgctgtagttggtaccgagccgggtgatggcggtgtgcaggtcggtgacttcctggctggcccgcagcaacgggctgttgaccactttgatcaggcgcgccgacagggccgtgtcacgactgatcactttgctcaggtggctgatgctgatctccgggtcttcggcggcctggcgaattttcagggccacctccggcaatgtcggcagaaccaggtcatcgttatcgatggccgttaccaacgcttgttggactttttccgccagcttgttcattcatgctctctagggtgctgcaaaaaagtacggcgattaacgctggatctcgcgatctcggtccagttggtagggcaggtcaagcaagtgcaggcctgggccttccaaggtgcccaagcgcacgtcgccactgtcggcagcttcggcttgcagcacagcgagaagttcaatcgactggtcagcttttgcggcgatgaccacttcgccgattgcgctgttatggctgggggaaaacagtggagtacctggctcggggagttcggcagcctccaggttcaggcgatacagacgccgcttgagtttgcccaggtactgcatgcgcgcgacgatttcctggccggtgtagcagcctttcttgaagctgacgccacccacggcctgcaggttgagcatctgcgggatgaacagctcgcgcgtctggggcatcacctgaccgataccggcacggatctggccaagtagccaggcattcaattcagactgttgcaactgcgcggccaattggctgcgcacggcgtcggcgtgttcggcaggtacccagagttcggcacggccctgggaaacgcggacggcgatcaatgcctcgttgcgtgccacgctgtcggtctcgaccggcagttccaggccaagagcggtcaaggccgcgtctgcgttagccaggccgaagcgcgcccaggcagcgctttcgtcggtgagcttggatttagagaacaccgcgtactttttcaaatctgccagctgcggttcaagcaactcggtggccatggccaggagtacgccatccccctgcagcaggatgcggaagctcgactgcatccggcctttttgcgtgcagcgcgcgcccaggctggcctgggtttcactcaggtaattgaggttgcaggtcagttggccctgcaggaacttggcagcatcagagccgcggacggcgagaacgccttcgtgggacagggagcagaaaaaagcggagtcagccatgggtcatcgcaggtcaaaaagtcatgggtgcatcatagaggggcgtccggcaaatgcatagtttccatatagggcgaccaaagccgactgttccagtgtcgtcggggctgtatacttgcgctctattttaggagggctccatggtcgaagatgtagaaatcaatcgcctctactggcacagccgtcgcggcatgctggagctggatgtgttgctggtgcctttcaccaaagaggtgtacgcgacgctcaatcaggtggaccgcgacctctacgtcaggttgcttacgtgcgaagaccaggacatgtttggctggttcatggagcgcgccgaatccgaagacccggagctgcagcgcatggttcggatgatcctggaccgtgtccagcccaagtaatcgtttcgaatgccgctggcaggcctcgcggctgttgctcgcggcctatgtgcttgcccaactgatcgcgctgggcagcctgctggttctaaatctgccttactcaagcctgggcatcctgttatgcctggctcattgtgcctgggtgttaccgcggcaaattctgctcactcaccgttcgtcgattcgtggcctgcgccgtgacgacgatggctggcaattatggagcgccgcacgcgggtggcaccctgtgcaactgcggcccgacagcctggcgttgccgctgatcgtggtgttgcgttaccgggcgcagggtgaacggcgagtgcggtccatctgcgtgccaagggatgcacaggccgccgatgtgcaccggcgcctgcgggtacgcctgaagttcagccggcgtaggtggttggcaccaggatagtgtcccgggcttcgggcagcatctgtggatagtcgagggtgtaatgcaagccgcggctttccttgcgctccatggccgaccggatcatcagctcggccacttgggccaggttgcgcaattcgatcaggtcgcggctgaccttgtagttgctgtagaactcgtcgatctcatccagcagcaagcgcacccgatgttgcgccctttgcaggcgcttgttggtgcgcacgatacccacatagtcccacatgaagcgtcgcagctcgtcccagttgtgagcgatgatcacgtcttcgtccgaatcagtgacctggctcgcatcccagcggggcagggcggctggtaccgggatgcgcggcagttgctcaagaatgtccgctgccgccgagcgggcatacacgaagcattcgagcaatgaattgctggccatgcggttggcgccgtgcaggccagtgaagctggtttcgccgatggcatacaggcccggcacgtcggtgcggccatgctgatcgaccatcacgccaccgcaggtgtagtgcgcggccggcaccacggggatcgggcccttggtgatgtcgatattgaaggtcaggcagcgttcgtagacggtcgggaagtgggtcttgatgaaggcttcgggcttgtggctgatgtccagatacacgcagtcgatacccaggcgcttcatttcgtggtcgatggcgcgggcgacgatatcgcgtggtgccagctcggcgcgtgggtcgaagcgctgcatgaagcgttcgccattgggcagcttcaaatgtgcgccttcgccgcgcagggcttcggtgatcaaaaagctcttggcctgcgggtgatacaggcacgtggggtggaattggttgaactccaggttggcgacccggcagcccgagcgccaggccatcgcaatgccgtcgccgcacgcaccgtcggggttgctggtatagaggtagactttggcggcgccgcccgaggcgagaatggtgaagcgtgcgccataggtatcgacttcaccgctggtgcggttcagtacgtaggcgcccaggcagcgttcgcccggcaggcccaggcgtttttcggtgatcaggtcgacggcgacgcgctgctccagcaattggatgttggggcgttggcgggcctgatcgagcagggtcttgaaaatcgcggccccggtggcatcggcagcgtgaatgattcggcgatggctgtggccgccttcgcgggtcaggtggaactcaaagccaccgtcgtcgctgccggcatgttcatcacgggtgaagggcacaccttggtcgatcaaccattggatggcttcccggctgtgctcgacggtgaagcgcacggcgtcttcgttgcacaggccaccgccggcgttaagggtgtcttcgacgtgggattgcacggtgtctgtgtcgtccagcaccgcagccacgccgccctgggcccagaaggtcgagccgttggccaggtcgcctttgctcaaaaccgctatacgcaaatggctgggcagggtcagggccaggctcaagccggcggcgccgctgccgatgacgaggacatcgtgttgaaactgttggctcatttgacggattccgcaaaaagcgatccaaaggggggcgcaaacaggacgcctggatcggcgaatcaaagggtcacacgggccactagtatatagaggggtggagcggcacaatagccacgccttcgtggcattgtgagattatgctgcgcagcgttgggaaacggccggttggcgggacgggaactttttgcataagccccgactcaatagcaggttgcccgaaagctgggaaaacgttgagtttattggcccgtcgggagcattggacgcgtcacgaaaccggcgacaagattattcgcgcagccggcaccgaccgtgctgcgtttttcgtgtgtgccaaatcagtgcatgccggaaacttgcttgaagggggagaacttttgcgaaaagcccgagtctatgtttgcaagcctgatcgtttagttatgcaagcctccttcaagtacaacgaggagtgttcatgctaacccaggaagaggatcagcagctggtcgagcgcgtacagcgcggtgataagcgagcatttgatctgctagtgctgaaataccagcacaaaattctcgggttgatcgtgcggtttgtgcacgacacccatgaagcgcaggacgttgcacaggaagcctttatcaaggcttaccgtgcacttggaaatttccgcggtgacagtgcgttttatacgtggctgtaccgcatcgccattaacacggcgaaaaactatctggtgtcacgcggtcgccgcccaccagacagtgatgtcagttcagaagatgcagaattttacgatggtgatcacggcctcaaagatctcgagtcgccggagcgtgcattgctgcgcgacgagatcgaaggcaccgttcatcgcactattcagcaactgccagaagatttgcgtacggcgttaactttacgtgaattcgatggtctgagttacgaagacattgcgagcgtcatgcaatgtccggtggggactgtgaggtcacggattttccgggcccgggaagccatcgacaaagccttgcaaccgttgttgcaggaaaactaaagacagcggcgacagccaagagaggaaccgccatgagtcgtgatgccctgcaggaatcgctgtccgcagtgatggataacgaagcggatgaactggaacttcgtcgagtgctcaatgcatttgatgacgcccaaacccgtgatacctggtctcgttaccaagtcgctcgggcggtgatgcacaaggatctcctaatccctcgtctggatattgctgcggccgtttctgctgcactggctgatgaagccgttccggcaaaagcctcgcgtggtccatggcgcagcctgggtcgtctggcagtggccgcttcggtgaccgttgctgtgttggcaggtgttcgcctgtacaaccaggacgagatcgcaggcaacgagctggcccaacagactcagcaaccggtcatggccggtccgcaagtcaagggcccggccgtgctggctggctacaaggaaagcaccgataccaccggccctatggccaatggtgtacttcaggggcaatccggttggcaggatcagcgccttccaggctacctgcgtcaacatgcgcaggaatcggccgccaaaggcactgaaagcgctctgccatacgctcgtgcagcaagccaggaaaaccgctgattcgctaaggagccctatgcgcgccataccgctccttacgcttttgctcagtagttggtttgcactatccgcccatgccgatgaagcccaagactggctgactcgacttgggcgtgcagagcagcagcaaagctttgaaggtacgtttgtctacgaacgtaacggcagtttttccacccatgacatctggcatcgcgtccaggagggtcatgtccgtgaacgcttgttgcagcttgacggctccgcccaagaagcggttcggatagacggccgggcgcaatgcatcagtggcacgttggttgccagcctcggtcattcttctgatgcaccctcgcgtattctcgatcccaaaaaactcaatccattctatgaactggccgtcattggcaaatcccgcgtggctggtcgtaatgcggtgattgtgtcgatcagtccgcgtgacccttaccgttatgggtttgaattacacctggatcgtgagactgcgctgccgctcaagtccttgctgctcaacgatcaagggcagttgttggagcgtttccagttcacgcgcctggacccctcggccattccttctgaccaggacttgcagcccagcagcgactgttcgccggtaacaatgtcgtccgccgctaaagcacctgacttgtctgccacgcaaaggtggcatctggactggctaccgccaggtttccaacagatcagcagcgccacgcgtaaagatacccaaacgaaatctaccgtcgacagcctgatgtatgacgatgggctcgcgcgtttttcggtgtttcttgagtcagccagcggcgctgacgtgaatgaaacccgtgctcagcttgggccgaccgtggcagtctcgcggcgcttgaatacggtggatggcgaaatgatggtcacggtggtcggcgaaattcccattggcactgctgagcgtatcgcgttgtcggtgcgtggtgaaaaggccgccgccaagccctgagattgttaatcttatgttcatcctgttctttcaatctgagcccgaatttggttgggggctgggtgtatgaaatctctggatcagcattttcacttgcaaaaacttcccatgttttttataggtcagggtttgatggctctggccttgtttgttcgcggaacaaaaaatgccggtcgcagtgcccggcatttattgaaccctgtcgcttaaccctgctcgtcgtaacgggagctgtatgtcgataccacgtttgaagtcttacttatccatagtcgccacagtgctggtgctgggtcaggccttacctgcgcaagcggtcgagttgcctgacttcacccaactggtggagcaggcctcgcctgccgtggtgaacatcagtaccacgcagaagctgccggatcgcaaagtctcgaaccagcagatgcccgacctggaaggcttgccgcccatgctgcgcgagttcttcgaacgagggatgccgcagccacgctccccccgtggcggcggtggccagcgcgaagcccaatccctgggctccggcttcatcatttcgcctgacggctatatcctcaccaacaaccacgtgattgccgatgccgacgagattctcgtgcgcctggccgaccgcagtgaactcaaggccaagctgattggcaccgatccacgttccgacgtggccttgcttaaaatcgagggcaaggacttgccggtgcttaagctgggcaagtcccaggacctgaaggccggtcagtgggtggtcgcgatcggttcgccgttcggctttgaccacaccgttacccaaggcatcgtcagcgccatcggtcgcagcctgccgaacgaaaactacgtaccgttcatccagaccgacgtgccgatcaacccaggcaactccggtggcccgctgttcaacctggccggcgaggtggtgggcatcaactcgcagatctacacccgctccggtggcttcatgggcgtgtccttcgcgatcccgatcgatgtggccatggacgtctccaatcagctcaaaagcggcggcaaggtcagccgtggctggttgggcgtggtgatccaggaagtgaacaaggacctggctgagtccttcggtctcgacaagccggcgggtgccctggttgcgcagattcaggacaatggccctgcggccaaaggcggcctgaaagtgggtgacgtcatcctgagcatgaacggccagccgatcatcatgtcggcggacttgcctcatctggtcggcgcgctcaaggccggcggcaaagccaagctggaagtgattcgtgatggcaagcgccagaacgtcgaactgaccgtaggtgccatcccggaagaaggcgcgaccctggatgccctgggcaacgccaagcccggtgccgagcgcagcagtaaccgcctgggtatcgccgtggttgaactgaccgccgagcagaagaaaaccttcgacctgcaaagcggtgtggtgatcaaggaagttcaggacggcccagccgccttgatcggcctgcaaccgggtgacgtgatcactcacttgaacaaccaggcaatcgataccaccaaggaattcgccgacatcgccaaggcgttgccgaagaatcgctcggtgtcgatgcgcgtcctgcgtcaaggccgtgccagcttcattaccttcaagctggctgagtaatccgttagacctataaaaaagccccgctgccggttaacggcggcggggcttttttgtgggcggcgggttcagctcatcatgcctttcaccaagcgctcttgttcgatcagttcgcgctgacgggcgtcgatgcgcgaggacagcgggaagttgctgccagcgcgccgcttggcaaagtccaactgctggatggcttgctggaaatcccccaccagtgcgaaatattcggcacgggcctgatgcaggccaatgatgttgccggacaagccgcgtgtttcggcgacctgataccacacgtccggatcgtccgggcgcgatttgagcagcccgtccagcgccttttctgcatcggcggtacggttctgtttaagcaacaggtctacccgcacctgattcagcggatagttgctggggtattgggtgagcattcggtcggtgcgttgctgcgcatcgggcatgcggttgctggtaatgtccagttcgatttgggccaggttgtaggtgatgtcgttgggcgccttggccaacagcggcgccaggctttcccgtgcttccttgagttgagtgcccttgatctgggcgatggccaggccatagcgcgccacgtcatttttagggttttcatccagctgtgcctggaagcgcttggcagccaggcctggtgtgtcttcgtacttgagctgtacccgtgcgcgaatcagttgatagcgcaggctgtcttccttgccgccgggtttggcttgttcggcgcggttgcgggtgtcggcgatacgcgattcggtgaccgggtgagtcagcaggaactctggcggcttggcgtcgaagcggtattggcgcatcagccgttcgaacatggtgggcatggagcgcgggtcgtagcctgctttttccagattgaggatgccgatgcggtcagcctcctgctcgttctggcgcgagaatcggcgctgctcctggatcgcggcggcttgtgaaccggcaatcgcggcgataccggcatccccggcacccgcagcggcggcgataatgccgccaagcagggcggccatcatcggcagttgcatgcgtgattgcgcttccacgcctcgggcgaagtggcgttgggacaagtgcgccagttcgtgggccagtaccgacgcgtattcgccttcggtctgtgcattgagaaacaggccgccgttgaccccgacgatcccacccggtgccgcaaaggcgttgagctgtgggctgttgatcaggataaattccaggcgccggtcattgacctggctggtctccaccagcttgtacacgctggtttcgacgtaatccttgagttgcgggtcattgagttgcgagacctggccgcgcaggtaagccagccaggcgcggcccagttggtattcctgttgcggcgagacaatggcagagctggcgtcaccaagtgacggcaggtcgtcagcgaaggccggggaggccagcaggcaggccagcgtcagcagggtagggcgcaaaaaagtcatgcacaaagcctttcgacaaagagcttactgtagccggacactgagcttgggaccagatattctaagcagcctaaatgtttgcctggagtaacaccatgaccgacgttgtagcctgtgacgccgaactcgacgccagcggtctgaactgcccgttgcccttgctcaaggccaagctggagctcaataaactggccagcggtgccgtgctcaaggtgacagccaccgacgccggctcccagcgcgattttcgcacctttgccaagctggccggccacaccctggagcatgaagacgccgccgagggtgtgtatcgttattggttgcgcaaggcctgaaggccttatcgaggcaagatcaagccttgttcagcgcctgcgctgccgccagcacggcatcaacatgccccggcactttcacgccgcgccattcctggcgcagcacaccttggctgtcgatcaggaaggtgctgcgatccacgcccaggtattccttgccgtacagtttcttcaacttgatcacatcaaacagctggcagaccgcttcgtccttatcgctgatcagctcgaaaggaaattcttgtttgcctttgaagttctcgtgggacttcacgctgtcgcgcgacacgccgaacacttcggtattggcggccttgaacgcggcgtactggtcacgaaaaccctggccttcggtggtgcagccaggggtgctgtctttcgggtaaaagtagatcaccacttgcttgcccttgagggctgcgaggctgaaggtctggccgctggtggcctgggcctcgaaatcggccacgggtgtgtcgatggctaccggcatagagaagtacttccttacattgggttctgtgggcgccatggctcaatcaaggcgtcgaggttcagggcatcggcgaaatccaggaactggtcgcgcagccaactgatttgtacgccggccggcaaagtcacggtaaaggtggcattgagcatggtgccgccggtttgtggcgcctggtaggtgtcacaggtcaggttttccagttcgacgttatggtcgataaagaactggcacagctcgttgacgatgtccgagcggtaggccgagctgacatacgctacataaggcagagcctgggggcggttttccagggcggcgctgcgtactacgttgacggtgaagtcatgcttcttggccaggcccggcaggccggtttccaggcgcgccaaggcatcccaggagccagaaatctgcaggaccagcgcactgcactcgccatggcgggtgaggcgggaggtcacgacggcgcagcgattctcatggctggcgcggcacagcacgttggtcagctccatggggttggcgccgagggcactgataacaaggaattgttcgcgaactgtgggggtggacatgcagccttcctaaagcgatgagcggtcgatgccgtgtgggcggtatcgatcaaaggatcaagggtagcgaaaagcgtcgccaagggctaggaggtggcgttttcattgcgtgatcagccgccttcgggcggtgctttggcccaatgatggcattgcccgaggtttagttgcgccagaacgcatcctcacgcggtacttcgcttgtacaagcatcttggcgccagtaccattacggctctctttttccggcaggagcggttgcatgattgcgggcagtatggtggcactggtcacacccatggatgcacaaggtcgtctcgactgggacagcctgggcaaactggtggacttccacctgcaagagggcaccaacgccattgtggcggtcggcaccacaggtgaatcggctaccctcgatgtggaagaacacatccaggtgatcgagttcgtggtcaagcgcgtggcgggccgcattgccgtgatcgccggtacgggcgccaactcgacgcgtgaagcgatcgagctgaccaagaacgccaagaaggccggcgccgacgcttgcctgctggtaaccccgtattacaacaagccgacccaggaaggcttgtaccagcacttcaaagccatcgccgaagccgtgcagatcccgcagatcctctacaacgtgccgggccgcaccgcgtgcgacatgaaggccgagaccgtgatccgcctgtccaccgtgccgaacatcatcggcatcaaggaagccaccggcgacctgcagcgcgccaaggacatcctggccggcgtgagcagcgacttcctggtgtattccggtgacgacgccaccgctgtcgagctgatcctgctgggtggcaagggcaacatctccgtgaccgccaacgtggccccgcgcgccatgagcgagctgtgcgccgccgccattgctggcgatgcagccaccgctcgtgcgatccacgagaagctgatgccgctcaacaagacactgtttatcgaatccaatcctattcccgtgaagtgggcgctgtttgagatgggcctgatgccggacggtatccgtctgccgctcacccgcctcagcgaagcctgtcacgaaccgctgcgacaggccctgcgccagtccggcgtcctggtttaattgaggaagcactacgcatgaagcgattggccggactttccgcacttgccttgattatctccagcaccagtggctgcggttgggtatggggcccggaaggctacttccgtgaccgcggcagcgattacctggaagcgcaagcaaccaaaccgatgcaactgccgcctgatgtcaatgtcgccaagcgccttgacccgttgctgccgattccacgcaacgttgccgacgacacggtcaagggtgagtacgtagtgccacgcccacagccgatcacggccgtggccgatgccagcgactacagcctgcagaaaagcggcgacaaccgctggatcgtggctcagcgcccacctgctgaagtctggccggtggcggtgcagttctttcaggacaacggtttccgcctcgaccagcaacgcccgcagaccggtgagttcaccaccgcgtggcagcaaggtcgcgagctgtccgccaacatggcccagcgcctgctggcgggcggtgtagccgccgacagcgaagcccgtgtgcgtgtgcgcatcgagcctggcgtgcagcgcaacaccagcgaagtctatgtggtcagcgccgagcggcctgccggcagcacggctgacgtcgacttcaccccgcgctcggtcaacaccggtgtcgacgccgcgctggtcgacgagatgctggccagcatgagccgtatctccgagaagggtggttccgtatccttactcgccgcccgtgattacgacacccctagtcgcgtcagcctcaccgaagacggcagcggcaacgtggtgctgaacctgggtgaagacctcgaccgcgcctgggccagtgttggccgcgcgttggagcagggcccttggcgcgttgaagacatcaaccgcagcctgggcctgtactacatcaacgtggctgaaaaggccgagaaaaaagacgacgagccaggtttcttcggcaaattgttcggcagcgcgccgaccaaggaagagatcgaaacccgcgccgagcgttaccaggttcgtttgagcaaggtgggcgaaagcgtgcaagttaccgtcgagaagaacatcaacaccgtcgcgccagctgaaacagcgcgcaaagtgttgggcgtgattcaagacaacctgggctgatccgatgcgttttgccgttctcggcagcggtagccaagggaacggtacgctggtcgcccatgatgacacgtacgtgctggtcgattgtggtttctccctgcgggaaaccgagcggcgcctgttgcgcctgggggttcaccccacgcaactgagcgcgattctggtaacccacgaacatgccgaccatgtgcatggcgtgggtttgctgtctcggcgctacaatttaccggtgtacttgagtcgcggcacgttgcgcgggatgcgcaaacccattgaacctgctggcttcctggccggtggtgagcaactgcaaattggcgccctgagcatcaatgttgttgcggttgctcatgatgcccaggagccgacgcaatatgtattcagtgacggtgagcggcgcttcggtgtgctcaccgatctgggttcttattgcgccaaggtgctggagggttaccgggacctcgatgccttgatgatcgagtccaaccactgccgagacctgctggcacgcggtcattacccttattttctcaagcagcgggtgggcggcgagctgggacatttgaacaaccaccaggccgcatacctggtgtatgagttgggctggcaagacctgcaacacctggtcctggctcacctcagcagcaagaacaacctgccgacgcttgcccggcaatgttttgtcgacaccctagggtgcgacccggactggctgcaactggccgatcaagattcagggctcgactggcgacacatcgcctagcccaccttactcaaagcggagcccatcatggaaaaacgtgaagaactctaccgcggcaaagccaagtcggtgtacaagaccgacgacgctaaccgcctgatcctgctgtttcgcaacgacacctcggcgttcgacggcaagcgcatcgaacagcttgaccgcaaaggcatggtgaacaacaagttcaacgccttcatcatgcagaaactcgaagcggccggtatcccgacccaattcgacaaactgctgggcgacaacgaatgcctggtcaagaagctcgacatgatcccggtcgagtgcgtcgtgcgtaactacgccgccggcagcctggtcaagcgtttgggcgtggaagagggcctcaagctcaacccttacaccttcgaactgttcctgaaggacgacgccaagggcgacccgttcatcaacgaatcccacgtcgtggcgttcggttggggcaccgctgagcaactggcgcgcatgaaggagttgtccctcaaggtcaacgacgtgctgagcaagctgttcgacgacgctggcctgttgctggtggacttcaagctcgaattcggcgtattccacgacggctccatcgtcctgggcgacgaattcagcccggacggttgccgcctgtgggacaaggacaccaagaagaagatggacaaagaccgcttccgccaaggcctcggtgacgtgatcgaagcctacgaagaagtcgccaatcgtctcggcgtaccgctgtaatcgacgcaagcatctgatagcacggaaaaaaatcgcttcggcgctttgcatccatcaatcatgctgttatgatgcgcgccgttggagagatgccagagtggccgaatgggacggattcgaaatccgttgtaccttcaccggtacctagggttcgaatccctatctctccgccattacatagaaaaagccctgtagctgaataagctgcggggctttttcgtttccggccgttattaacggctgcttcagggatttgttgtagtcctgccttgcgctgttcaaggcgctcagacgctttgcgataagcctgatcacgctcacgtttatcaacggcgaccacgaacaccgtaatttcctggtcgatcacttgatacaccagcctgtacccgctgctacgcagtttgatcttgtagcagtcaggcaggctatgtaggcgattagcttcaatacgtgggttgtacaggatttcgactagcttctttttgagttgctgacggagggtgtcaccgagcttttgccattccttcaatgcacgcgcatcaaaatcaaggctataggtcatccaaagaaaccctcacgcgttgaggcgatgcaagacgctcacgtacggtcgccatcaaggcttcatcctcttcagtcatcagcacaggcttaaatggcaactggccgcgctcggcaacatattgcaacgcctggcgtatcagttcggaaggggtgacaccaagtttctccagctccaggtaggcgcgagttttcaagtcgtcatcgatacgaatgttgatagatgccaagggatagctccttgtgtaatgacgttggtcattacattggagcaatcgggtttcattggcaagtttgtctggacatacggcagtcgctctcatctgttgatcctactttttggccgtcggctttgccgggcgctttttatcggtttctttcaccgtttcccttggtcttttcttcgcctcttgctcggttacgtattcacctgtgaccgcatcgcgatatctcgttggcatatcagcacccttgacagtatgtcgccacggcggcgactttttgagactagctcgcaggcttatgcacacaaggttcccgttggagattctggttaccaagctttgccgaaacaggtgcttacgttgtgcaggttcggcagttttcgtgcagggttgcgttggctggggttacatcatgaataagatcaccgctgattctaccgaagggcatgcacgcaaaatcttttgcgtagccgatgatgtcggcaccgaagaaacccttataaacgccaccgaaaccctctcatccgcccttcaatccgcctaccaatgcgccgaagatccagtcagcacgcagtcgcccgtgatcatggctctggctcaattgatcgagaacgcgcaagccttggtggatgctgtccttgagcgtgatttccccacggccaaataaatacctgcttctgaaacgaaaaaagcctgctgaactcagcgctcagcaggcttttttgtggctgcaactcggtcaggcaggctgcgccaccaagctgttgctcaccttgcggcccaacaccagcacggtcgcaaaccccaaccccaccaacacagtggccaggctcaacaacaccgagctgcccatttggtcgacgatccgcccaccaaagaacgagcccagggcaatgatcacctgaaacagcgccacgaacagcggcatgcctcgctccacatccttgggcgctaccacgaacatccagatactggcgcaggccgggaaggcgccaaaggcaaagccccaaagcgcgatcagcaccacggcacccgtcataccggtggcgaagtaggggaacagggcggtgctggtaccgatcatcagcgcgaccagcagcaaggtgttacgtacgctgcggttggcggcgaagccggcgaacacattgcccagaacgcctgccacgccatacagcagcaacaatgagccaatcgtcggcccgtcgaagccggagctgtgcttgaagaacggcgcgacataggtgtacgcagcaaagtgcgccaagccgatcaacagtacggcgatcaacccgacgcgcgcttgtgggttgataaacagggccggcaggtcgcgtacctctatggccttttccggtttgaggcgcggcagcagcaagacttgcgccagcagcaccggcacacccaccagcgcggtgaccagaaaggtcatgcgccagcccatcaggccgctgagccaggtgcctacgggcacaccgagtacggtggccagggtcacgcccatcatgatgatcgacgtggcttttgcgacgcccacgcccttgggcgccagcctgccgctgagggcgatggcagtggcccagaaaccgccgatgctgatgcccagcagtacgcggccgaacagcagcaggctgaaatcggtggcataggccaccaccccgttggcgaggatcatgaccagcgtcaggccgatcagcagatagcggcggtccatggcgccaatgccaaccgacagcaatggcgctgcaagggccgccatgatgccgggcagggtgaccatcaggccggcgtggccggcactgatgcccaagtcgctggcgacgtcgttgagcacgcccaccggcagaaactcgctggtcaccagggcaaatgcacccacggcgaccgaaagaattgccagccactgctgtttgacgctttgttgattatgttcgggaaggccgttagaggcctggctcgcgcttggcatggtgtggggttccaaggtgaaagtcgcctgaggtcagacgcaggagagggaagctgggggcgattataggaatcagtgttggcaatcgagcaggcgctcgtttcgatagtaatcatcagtgctatcgatgtgaggtttttgaagagtcctcactcagcatcacaaacgaaaaagcccgaagttgagtcagctccgagcttttccggttatgacgatgtttaaggtgcagggggtggagttttattttagctagccagcgcgttcagtacatgtactggatcattatggatagctttcaacaacgcctttgccggcccagtaggttcgcgacgaccctgctcccagttgcgcaacgtaccgagctgaacgtcaatcagcgctgcgaatttagcctgggtcagccctgttgccttacggatttctttaactcgcattgagtcaacatgaaattcacgggatggctcccgttctccgcgcaggatctcgttcatctcttgaacgctttccatcaattcatcaaaaagtcggctcatagctatctccagtgctcaatcgcagccttcagtgacttgcgttcgtcggcgctcaagtcctgctgttcatttttgggatagatcatcagtaaaacaatctgtgatgccgaggcgaagtggtaatagatcacacgtgccccgcctcgtttaccatggctcttggctgctactcgtattttgcggataccgcccgtaccctcaatcacatcgcctgcggcgggattcactacaagcacgttctgaaaggccatgtaggcatcctcgtcgatcaattctttaacgcgacgtgtgaagaccgatgtctcaatgaaaatcatcgctaatgtacgccattggcttagttggctgcaatcctagccgtgcgcgcttcggtgcgcatccggtgagttgtaactgctttttggcgcactcggatgcggccaattatgttctggccaaccgctccaaaaggcactcaataaacaccccctccgcccgactcatcttctgctcccgattccacagcacgtgaatatccacatccgcaatgccctcatccggcggcaaccgccagagcagcccgttctccacatcctcggccaccacgtgcaccggcaggcatcccaggccatacccggcaatcaccaggcgccgaacttcttcaaggctggatgacgacgccacgatccgcccgccgaacccttgctgatcgcgaaaaatcgtcagcggcgagagcatcccgccgatctgatcgctggtaaaactcacgaagttttccgactgcaagtctccttcgaccaagccggtgcgtccgaacaaggggtggtgtttcccacaaaaaaacgcatagcgctgacgtaggaacaggtgctgttccaggcgcggctgtggccgacggttgaggctcagccccaaggttgcggttttttccagcagggcggcgacgatgtcggagctgcgcatcacttcgacctccaggtctacccgtgggtgctcgcgatgaaagcctgcgagaaagtcatcgaacgtgtcggaattaatccggctgatcatcagcaagcgcactttgccgatcacttcatcacccggcttttgcagggcgttgctcatctgcgagacctggccgtacatctcaccggcaatggcgaagatctgctcaccggcctcggtaagcacaaagcgcgggccacggcgcaggatgagctggcagtcgagctgttcttccaggcgcttgagcgcctggctgatcgccggttgcgtgaggtgcaggcgggcggcggcgcggctgatgctcagttcctggccgatcacacggaaggtgcgcagcaagttccagtccaggcggtcattgagcagggggtgaatatcgcggcgggattcgggcatggggtcgctcgataataagcagttcttataatcaagataataaatagaaaattgactaatcatagccccaggccgaaaaatcgggctcaacaagcgccaccagagcgcactggtttgaccttctcctgccaaaaaaataaccaaaggagccagccccatgaagccttccgcttcgccgcagcctcgccgtgccgcggccgccgcctttatcggcaccatgatcgagtggtacgacttttacatctacgctaccgccgccgcgctggtgttcggtcagctgttcttcccttccgacgataaactgttcagcaccatggccgcattcggcaccttcgccgtgggctttttcgcacggccgttgggtggcgtggtgttcggccatatcggcgaccgcatcgggcgcaagaagtccctggtgattaccctcgtgatgatgggcgtggtgacggtgtgtatcggcctgttaccgacctatgcgcagatcggcgctgcggccccggtgttgctgattttgctgcgcgtggtgcagggcatcgcggtcggtggcgagtggggcggggcggtgctgatggccggggaacatgcgccaaaggggcgccgtaacttctttgcatccttcgcgcaattgggtagcccagccggtttgatcctttccttgctggcgttcagcgctgtgacccgtctgccagaagaggatctgctcagttggggctggcgcctgccgttcctggccagtgccttgctgctggtggtcggcctggcgattcgcctgggtgtgaacgagtcgccggagttcctcgaagacaaagccctggcggaaaaagcccgcgccatcaagaaagaccaagcccccgtgctggaagtgctgaagacggcttggcgccccctgttgctgtgcattggcgccaacacgttggggattgccggcgtgtatttcaccaacaccttcatgattgcctacagcactcagcaattggacctaccgcgatcgctgattctggaatgcctgttcttcgttgccattatccagttctgcgttcagccgctggccgcctgggtggcggagaaggtcggcgctacgcggttcctgtgcgccatgtgcgtactggcaatggcttcgccgtatccgatgttcgtcttggtcagcagcggccaggcgcccttgatcatctttggtattgccttggcggtagtgtgcatggcgtcgttctacgccgtgatcgcgggttacgtcagcggcctgtttgaaacccgtgtgcgttacaccgcgatctctttggcctatcaggtgtgtggcgcgttggccggtggtttgacgccgctgatcggcacctggctggcccatcaatacctgggccaatggtggccgatggcggttttctacagcgtcatcgcagcggtgtcgttggtgtgcgtactcgctttgtcccgccgccacgccacggcccaccgcctggaaatggcacacagttgagggagtcagcaatgttgaagattaatggtgagcgcctgtggcatagcctgatggccatggccgagatcggcgcgacggcacgcggtggcagctgccgtctggcattgagcgctgaagacaaggccggtcgggagctattcagccactggtgtaaagcagctggcctgacgttgagcgtggacgctatcggcaacctgttcgctcgccgcgccggcaccgataaggacgccgccccggtgatgatgggcagccatctggatacccagcccgaaggcggacgtttcgatggggtgtacggcgtgttggctggcctggaggtgatccgcagcctcgacgaccacggcatccagacgcgcaagccgttggaaattgcggtgtggaccaacgaggagggcgcccgtttcaccccggccatgctgggctcggcggtattcaccggcacgctcgccttggacaaggcactggccaccgccgatgtcgacggtatcagcgtggccgaggcgttgcgcaccaccggctacaatggtgagcgcccgttgggtggcgcagtggatgcgtattttgaggcgcatatcgagcaaggcccgatcctggaagacaacgccaacagcatcggcgtagtcaccggtggtcaagcgattcgctggctcgatgtgcgggtcgaaggcatggctgcgcatgccggcaccacgccaatgccgttgcgtaaagatgcgctgtacggcgcggcgaaaatgatccaggccctggaaaacctcgccgccgattttgccccgcagggcctcaccactgtgggtgagctgagcatcgccaagtcgtcgcgcaacaccattcccggcttgctcaattttaccgtcgacctgcgccatcatcgcgacgccgatatcgacgccatggagcagcaagtgcgcgcacgcctgcaggcaatcgctgaccaccgtggcctgagcgtcgccatcacaccgcactgggtcagcccggccacgccgttcgacgccgagtgcgtggcctgcgtgcaggctgcggtggacgctttgggctacagccagcagaccatcgtcagcggcgccggccacgatgcgattcacctggcgcgctattgccccaccgcgatgatcttcatcccctgcgtcggcggcctcagccacaacgaagccgaagatgtcttgcccgacgatgtgcgccagggcaccgatgtcttgctcaacgccgtgttgaaacgcgccgggcgtgttcatttctgaaggctgacgccatgcctctgtgggagcaggcaagccagctcccacaggttctgtgtttatccaggagcaactcatgaagacgttttttcaccccgaacaactcctgcatcacccgcgtagctactactcccgcggccagatgcgcacgccccaggaggttcccgagcgtgcgcgcaacctgttgctggctgcgcaaaccctgggcttcgatatccatcaaccagccgattacggtctggatccgttgctcgccgtgcacggtggcgcctacctggcttttcttcaagaagctcatcagcgctggaaagagatccccgaagactggggcgacgaagtcatgtccaacatcttcgtacgtgaacccaatgccctgcgcggcatcctggcccaggctgcgcgctacctggccgatggcagttgccccatcggtgagctgacctggcgctcggcttattggtcagcccagagcgccgttgccgcagcgggtgacatcctcgatggcgcacctgccgcctatgccttgtgccggcccccgggccatcacgcccgcttcgacgcggccggtggcttctgttacatcaacaatgcggccgtggctgcgcaagcgctgcgccaaggtttccagcgtgtcgccgtgctcgataccgacatgcatcacggccaaggcatccaggaaattttctacgaccgcgacgacgtgctgtatgtgtcgatccacggcgacccgaccaacttctatccgggcgtagcaggctttgccgaggaaaaaggcaacgacgccggcgaagggtacaacctcaacctgccgatggcccatggtgccagcgaagcggtgttcttcgaaaagctggagcaggccctggcagcggtgaaggacttctcggcggatgtgctggtgttgtcactgggttttgatatctacgagctggacccacaaagcaaagtcgcggtgacgcgggaaggttttgcgcggttggggcagtacattcgagggctggggctgccgtgcctgatcgtgcaggagggtggttatcacctggagacgttgaatagtaatgcgcaggcgtttttcagtacgccaacagcctggaagacgctaaaagcctgctgatcagttttcagcaggctttccagtccttgttgggtgctcgttctcatctgcatgcaacgacgccgcgtagtcttgccccccataaaacacgcccatgatcgataccgttttgaaatcaggcctcacccagaaagcaataatggtgctgcgacgatagtgagtgatgcgcaagtctttcagcaggtcgtcacggcgcactccacgcaagggaaacagggcaaggctttcgcagtagctgacaagattgtcgataaaacgcgccgctacaggaggggagccgacatcgctgatgtagtcttcgagtgcatcgagttgcgccaagacctcgggcgaaaaaactaccgagtagctcacgcttcccctgtgcctttgcgctgacgtctggcggccatgtgttcgcggacctgttctggcgataacccaagctcaggcttcgcctcaagggcggtcgctgctgggataacttcgtctctgagccagtcttccatggcacgatcacgcgccagcaacgcccgcaggccgtcgcgaatcacttcactttcgctggcatattcgccggcagccaccttggctttgaccagtgctgccatttcaaggggcaaggtgatgctcatttgctgggttgagcgcatgggggtatccgccgcaggtgagtaggattcaatcctactcgaccattggcgcgatgcaagaagcaactgatcgatgccgatgcccggcgcctcgtcgtccatccagaaggggtaggtttgcatgagttgctacgtctccagttgtgtaggtcaggcttcaagtattgacccgttttggcgatcgcgtggccgcaggcggctgataacctgctgatatgtatgacttcatatgtgtaacaggatgatctcgacaaaccctctcggcacacatggcgtcccaccggctcccatacgataatgctcgccacctcgaccacctttggcctgcctcccgtgatcatcaacttcgacctcaacgacctccaagccttccgcgccgtggtggacaagggcagttttcgtggcgctgccgaggccatccgtatctcgcaaccggccctcagtcggcgtatcgaaaagctcgaatcggcgctggatgtaaagttgttcgaacgcactacgcggcgggtcagcctgaccatggtcgggcgcgcgtttttgccccaggtcgagcgaatgctcgatgatctggacatcgccttgatgggcatcagcaacgtcgcgtccacacgcatgggcaacgtcaccatcgcctgtgtgccgtctaccgcgtattacttcatgccccacgtgatctccgaattccacaagctgtatccgaagattcgcctgcgggtgctggatgccagtgccggcgaggtgtgcaatgcggtggccagcggcgaggcagactttggcgtgagtttcagcggcagcctggccgatgaggtggaattcgagttgctgctgcaggagcgctacgtgctggcctgccggcgggatcaccctctggctgcgcgtgacagcgtgagctggaccgaggcttatgagcatgactacattgaggtggacaagacgtcgggcaaccgcttcctgctcgaccaggccctgcgtggggtgcgggtgaaaaagccgagtatctgcgagacccaccatgtgaccacgatgatcgggctggtggaggcggggctgggcgtggcgatggtgccgtcgattgcgatgccggcgcacactcacccgattctggtcagtgtgccgctggtggagcctcacgtactgcgcaatgtgggcttgatcaagcgccgcgggcggacgttgccaccagcggcgttggagttggagcgcttggtgcgggagatgccgttccggtcagcgtgacaccgagtccaggccggtggattgcacttccggctgggcctcgggcgatgccatgaactgcaacagggccttggcctgctccgggtgttcggcgttcaccggaataccggcggcaaaacgggtaacggactgcacgtcttccgggatcttgcccacaaacgttacacccttgactggcaacaactccgccacttgctgcaagccgacctcgtaatcacccttggccacctgttcgcccaccggcacgcgttcgatcatggtgcccttggccggcatgccgagcttcttgaacagttccttctcgacatacacgccgctggcgctatccgaataggccaccgacttggcttggctcagcacagccttgagctcggcatcggtactgatcgcaggtttggccgcaccttccttcaccaccaggccgatccgcgagtctgccaattccacgcgcgaggcggggtcgactttgccttgtttgatcagctcatccagggcatagccgaccatgatcaccacatcggcgtgctcgccacgggccaggcggttaggaatcgcttccggcgccttgcccatggacgggccgaggatggtgtcgagggtgtcaccgctttgctcggcgtattgcgggccgagcaatttataggcggcggtgaagccacccgaggtcatgactttgagttgttcggcctgggcggtcagcgccagggtgccgaggacgacagcagtgagggtcttgaccagcggcttcattgcgctgcctcctgcatgacttggccacgggtattggcgcggcgatacaacgccagggtcgaacacaaggcacacagcgcggcgaagatcatccaatatgcaggtgaagccttgtcttcagtgatatgtatgaaccaggtggagatcgccggggtaaagccaccgaacactgcggtcgccaggctgtaggccagggagaaacccgccacacgcacttccaccggcatgatttcggtgagcgccgggatcatcgcgccgttgtacatgccatacaggaacgagaaccacagcagggtttccagcatgtgcgcaaagcttggtgcgttgaccacgtaggacaatgccggataagccgtaaggacagtcagcaccgtcatggcgatcagcaccggtttacggccgaagcggtcgcttaacgtgccgccgatcggcagccagaaaaagttcgagatcgcaaccagcaaggtcaccagcaaggcgtccgaggtgctcaggtgcaacacggttttgccgaaggtcggtgcgtacacggtgatcaggtagaacgcggtggtggtcatggccaccatcagcatgccgccgatgaccacggtccagttcttcaccagggtcgccatcacttcacgcatggtcgggcgatgcttgcggttggcgaactcttcggtttcctgcaggttgcgacgcagcacaaagataaacggaatgatcacgcaaccgacggcaaacggaatccgccagccccaatcagccaccaccgcaggttccatccacacgttgaggccataacccagagccgcggcaacgacgatagagatctgttggctacccgactgccagctggtgtagaagcctttacggcccggcgtggccatttcggacaggtacaccgacacgccacccagttccgcgccggccgagaagccttgcagcaggcgccccaacagcaccagaaacggtgcccataggccgatggtctgataactcggcaccagcacgatcagcagcgtaccgctggccatgatcgacaaggtcacgatcaagcctttgcgacggcccacgtcatcgatataggcacccagaataatcgcgcccaatggccgcatcaggaagcccgcgccgaacacggcgaaggtcatcattaatgacgcaaactcattagcggccgggaagaacgcggcagcgatataggtggcgtagaaaccgaacaggaagaagtcgaactgttcgaggaagttgcccgaagtaacgcgcaataccgcgcctactttcgagggggcagccgcaggccgggaaggggtcgtcatggttttgtgtctccagcgttctttttaaagtgcttgtttcgcttaagacttgggatagtggctgacacatttagaaatgataagtgacaaatttggattgattgatgtgtgttggctatcaatctgagccagcttcaaaatggcctgccgtgttctatgcttgaacctgggtccaattcttatcggcggaggtcgctatggggaacgaacagcagcacaacaagccggagcgtgaagaaccccggcagccgcgcgaagacgaaaagccgcaaacctggaagcatccggacgacggcaccgagctttccgaacgtgaccaggagcgcccgctaaagccctgagcatcaggtaaaacgcggtctaattgtgggagcgggcttgctcgcgaaggcggtgtgtcagtcaacggagtcgtcggctgaaccattgccttcgcgagcaagcccgctcccacatgttttaccgtgcacatagacgcagctccccagccttcctaaactgccgcttgtcttggggaaaggggcaggcgccgatgaatcgcaatgaattacgcaaggccgacatcaacctgatggtggtcttcgaagcactgatgctcgagcgcaatgtgacgcgggtggcggagaagctgtttctcggccaaccgaccatcagttcggccctcaaccgcctgcgtaccctgttcaacgacccgctgtttattcgtgtcggccatcgcatggagcctacggcgcgcgcggaggagatcatccagcacctgtcgccggccttggattcgctgtcttcggccctgagcctgacccatgatttcgacccgtccatcagcaccatgactttccgcatcggcctgtccgatgatgtggagttcggcctgctgccacccttgctgcgcgccttgcgccaggaagcgccacaggtggtgtttgtggtgcagcatgtggactactggcgcattcccgacctgctggcttccggcgacattaccgtcggcatcacccagacccgcgggctgccggccaatgccaagcgtaagctgttgcggcacattcgcccgtgcctgctgcgcgccgatgcctcggacacaccgctgaccctcgacgaatattgcgcacggccccacgtgctggtgtcccacaccgccaacgtggccgggtttgccgatgagtggctggccgaggtgggccgcaaacgccatgtggtgctctcggtgccgcaatacagctcgttgccggccttgctcgccggcaccgacatgatcgccagcctgccggattacaccgcccaggccatggccgccagcgggaacctgttctgcgagccgttcccgttcgaaaccccgaccctggatttgtcgatggtgtggctcagccatgtcgacaccgacccggcggaacgctggatgcgctcgcggctggaggccttcatgagtgatcgcgggttggtagcgaataaagcctgaggcttatatccgtgctatgggcagggagggcggctcaagaacggctaatcctcaacgtgttcttcttgaacagggttgctaatcagcgacgcacgcaaaatacggatgcgttgctcggagtgataggcgcctgcttctgtaaacttgaggaatgctcgcgagcaacacttacagccccagatgcttgaaatattataaggaaagaaatcaaagcagataggcgcgtcctcagaccagaaatgggtaccgttcgggtggtattcctcaaggctgagttcttgtgccctatcgctcgatatttcgcctatgaagcgcaataggctgctcgcctcgagtgttttgggtaaggtttcccacccctgcgacaagccccgaacacaagagcaggcagtaggctccagcgaagagcgttcggcaatctgcctgatagtttctggcgtgagtatcatttttatgctgttccaggcggtaatagctcagattcggttcttgcttaaaaccagtttgttcaaatagctttcaattttgggtaaaacaaactgcagtatcttcggcatggtgtggataggcagttggcagcatgcaaaatacaacgccattgtgggcgataagctgacaccaagagcagaccataatagtccaacatttctattgccgccgttgagtgccatggtgaacttggagatcaatgatccgggatataaacagcccatgagaagctgcaggcaaacgttgatgcagtaggcgatggcgatcattgagatggccaacgaaggggtctccagaattacctgctgcatgcccgccatcgtgcctactgcaaagaggaaaagcgcgatgacgacaataccgtcaatagccaggccgtgcgtggcgacgaaggtgtgggaaaaacgacgtatcaaaatagcagcgccttcggcgcctcctatcaacacggccagtctgatcgccagatcaacagggtttaaggagagtgaaaggccatcagcgaataggtggagtatcagcggagcggtgacagggataattgccattgagcagagtgcagtcaccaacgacatggaagggtcaagcccgagcattctcgcgacggctgcatttccgctggcgggcggggcggcaacagcgatggctatcgcaagggacagttcttgattgccggtgaggtaaagcgaaagcattccaaaaatataagggcaagccaccaccatcagggctggaaatatcagagatatttttaagtttcttgctgcagtgatgacttcagcgttgttaatacgcagcagagtgcccagaacaaatatgaaaaccatgacggggagcaacggcctcgccaagtctgcaagatagggaatagccaatccaattgcgcaaccgcatgcaagtacggtaggccctctgcgcgtaatttcgggcagaattctgtgcatatgagtgctctcgaggcgacgtccctttcgggacgctgctattaggtacgcagagttatttcaggtgtgacagacggcggtggcgagttcctggattgcctcacgaccaggcgcccatcgatcagaatcgaggtaatacttggaaggtcaccactgctgaaacttccaagtacgctgggttgcgctcctcccaaaggcccgcaggcgatcagaatgtcggcttctcttccgacgcccagaatcccgcgattcaactttcgcaccttggcggtgttacccgttgcgaagcagacggccttttccggtggtacgtcgccgaaactactgagcaaggcaattgccctgagcataccaagcgcgggaaccccacatccggcaggagaatctgtgccaatgacgatacggtccagttggttcatttctcgtgcgtaattcagggtggtgaccgccgcgaactcgttcccgttatgtacgatttccaaggcacccagacagccttcacacaggcatctgatttggctcggtgccagtgcggtatagccgccgttgatatgcccgatgatatcgggcgcaatttcaaggatctcttctgcgcccatgctctgggaagtagaaattgaaggaccgcccgtgtgggtgatagaggtcatgccgtgtttgcgagccattttgaccaattcagctgcacgactgactgacttgacagggccaatcccgacctctcccagttggttgatgccttgagcaaccattgcggcgaaatcctcatccgaaaattcatcgttgagcagtggcgcgccggcttccatttttattccgctagggcgcgcattggagaaagagcgctgcgctgcgattgccatggcgatagtaccgaccctgtcggtcggtagccccggaacgtgcacttcaccggcagagatcatgctcgtcacgccgccctgcaaggagtgccagatccaactgtggttgccagagcgcgggctgtactcacccagggtcgggtgagtgtggttgtcgatcaaacctggcatgaccgtgctctgtttggcgtcaatcagcaggtctgcgtgtgaaaaatctacatctactgcctgaccaacgtaggtgatcattccatcaacactgacgagggtatcggctgtaatgagtggagttgcgagatcacccgtgagaaaagtgcctatattatgaataattgacgtatatggcttatggttcgacatttaatttatctctttatatcatcgagtaacgggttcgaagattcgcgcgccacacttgttgaatgagcggaagttccacaagttgttagtgatgaacaaacgctggatccaacggtacgcatgcccctctggatcgaaactgggggtgaacttatcacgcgaatggagcatgaaacgattgttgatgtacaccaacttgccaggttgaatgtccagcggccgcgctacgcttttaagcgcgttgtaaaatctcaacagggtattttgtgcttcgtgatcagcggcaattaccatgtccgggtaaaacgccgcagtgactctagggtgagtcagcgggccgctcagaattgggtatacatgagtttctttcgcgcctgcggtactgttcctccagcggtagggctgacgaatgatgaaatgtttgccatataggatttcaatatcggcctgttccagtgcctgaagggcttccctcgcatcggcaacccaggttttcgggcccaccccggcagggtcaccgcgaacgccgagaagcaaaagagccagcggcgaggtgtctccacgggagtcataagcctgaaaggcattctcggtgtgcaggtccaactccaggtccgaaccgttgccggtatactcgcccacggcctccggatgcggtaccaagtcattgatcagttttggcccctcatgcttgatggagtagggctccgctatcaaactgcccagggcaaccagcacattttcagaaagataaccgcttttgaagttcaagctattagcgtcgccctgcgggctgccaaatgtgttatcaatcggaaggttctcgaatacacaataagaagcatcgtcatctttaagggattcaagcttttttagaagtcgcgcaggaaacttttgataagcggtcatgcgaatgaggtggatgtagtctcgccctcccgttggctcgtaacaaatgtctataagcgcgtcccgaatactctctttttcaacggccgtcagccagaagctgttggcgtctgcacatgaatcgtccacacgcactcctttaaaggtctgattgatttgtcatgagttaagttataagtaaattaagactttcaagcgctgaggtggggtccccgtaagcacgacctgacagtgtccatgctttgataaggcccgacctgagtgggtgactcaacctaagagcttatctgtgtacgcaccggtgaagtgatgggtggtaaattggccatcagcatcatagggttgtccttcatcggtgctgatgattcttgataatcgcccacgatgataggcagtcaagaagttgaagaatggcgtgctttcttctcttgtgtcagatactccgtaaagcctcaactgttttattattgcagcttcaaggtgtggcaacatataccaagggcacgttggaaagcagtggtgggccgcgtggtaaccaaaattcaaaataatcagattgaggaaggtaaactttcttgccaccggtacggagaaggtgtttttgatttcgtagtgttttccatgggttagcttttctccttgcgtatacacctgctggaaagaatgctggaaacagtcgacgaatcgtacgatgtgtatcctcaggaaggaggaggcttgccataccagcacaaccatcagggagaaccgggcaaacgtagcgaaggctacaacgtaaatgcacaggcttccaataccccttgcaacctcgcgcctgctgccactaaatatcacagcgtaaatattggtaagcttgatcaaatagtagaaggcgggaaggtatattttttctgcaacaatgatcgcactaaacagccttggatgagcgacagcaaagtgaccactatcgaacccaccaatatcaattttttcggcatgatggcgaacatgatcttttctataggcttcaaatgaaaagaaagaaaggccgttaaggaaagacagcagctctccgacgacagcattgactttcttcgacttgaaaacagaattgtgcgcgcaatcgtggctcaggtaccaggaccagattttcgcaagggcaattaagataatcgcaccgagtgccgcaacgatctgttgagtatacgccaggaatatgccccatacagtgaaggttgctatcacacttagtacaatcactgatggcaataattttcgctctttcgctattgaaataagcagggttttcacgttggcgtctttgatggcgcgcagataattatcagcatacagtaaagacatctcatcaccttcaagagcaaaattcaccgaaacgcttattgagctggttggcgggctggcattgaacaacggatcatgcctggacaggcgtaatcccttccgtgcgcatgtggaattaacgacggggctcgaatatgagcacgcacacaatgccaaagatgtagtgcaggtgtacgggtggctagggttcttttgctgttgcttctggtgccagtgaaggcggcactagcgagactgcagcgtgagtatccgcgcccgagggttgatcgccgctactggatttgtagccaatcagtatcacgccgacgatgcacaataaaacaccggcaatgtttaaataggagagtccttctttaagcagaaataccccgatgaagccgagcgcaatattgataatggcgccggtaacgatattgcccgtgctgaggtcccatccactgcgatacatcatcaagaagccgatttccatcatcaagatgcaaaacgcgatgcctccctgaagccaggtcatttgcttcaagcccgcgagtaacgttccactgcccaaaaaaaacggcaacatcaatgtggacaggatgacgatcgccacatagatactgacaattgaaaccaaggggttgatcgtagacggtattttcttcatgagcatgtgatagcccacggtgcccagtatcgctacgatcgctgatagatagaatgtgtattctttacctagcacgttcaatactcctactagttgggttcaagttcacgaaatgtggtggtttccaggaacctcttgtccatgtactcacccgcgatgatcgctctgtatttcgcaggactgccctctgcgcaacagctgggcaggcactccactttggcggtgtagtctggatccataaagaacgccgccgagtggcgtaattggccagatgtatttattactcgatgcagcgttgctttgtaacggtcattcgtccagcgagacattagatccccgacattgacgacaaaggcatttgggatgggtttgactttgatccaggtgccgttagcactctgtacctccaaccccccggtggcactttccgagatcatggttatccagccgaagtctgtgtgctctccagcacccatcggcgctccctgtgtatattgagtggagggataacgcaggactctcaattgggccatcggcttcttgaatttatcatcgaagtaatcgatcggcatattgagcgcaagggcaaacacgtttagcagtttttttccgaatatgagcatttgcgagtgatattccgtcatcgcaagcttgaagtcgggcaattcctctggccatacattggggccgtaaaaaggtaatttggcttttacgaactcgtcgtcaagcgacaagtccgctgccatgtcaaaaccctctttgacatcgcccaatatgccatccgacttatcagcgccttcgctgaagtagccacgcatatagggagatttatgaatttcgattttctccttggcctgaacaggcaggtcgaaaaacgattgtatttgagagaaaacagttgaaataagcgtgtcatctacaccgtgattgacgacggtgaagaatccgacctccctgcacgcgttgtcgatctccttgactaggcgtggtgatatctctgcgccctgcgtcaaactaccgacgtcaatgataggtatgttcttttccatggatgcaccatttgctctaaaaaaggcgcaacgagacctactccatgaatactgaagtgcactcagggatagaccgtatataggccagtgtcatttatttagactaaggaattccgtcagctcgcaagcgctggcagtaagcactcgacattctcgatcggcgcgcctcctgttacaggctaggtggcgtagcctagaattcacttctatgaaagcgaaggcaaatcagataaagtaagcctggcttagtttttttaccatggaagggggattgattaatgttcgcaaaattgccgttgacagccattcgtgcatttgaatctgccgcaagactcggtgggtttaaagcagcctccgcggagttgtttgtcaccccggcggcagtatcacaacaaataaaaacacttgaaaacttattgggcagtatgctttttgtacgcactcctcatggtgttcaactcactgcgaacggtgagaggctatattcaaaggtgcatctttcttttttggatataagcagtagtatgtcgtcgcttaagccacccgccgactccaacacactccgagtttctaccacgccggcatttgcgtctttatggttgattcctcggctggcgaaattttatagtgaacatccagatattcatgtcagtgttgaaaccagtaatgaagtggtggatttgtttcgtgactcatctgttgatttagctattcgttgtgggtttcgcgattttccagacttgtacagccacgcgcttatgcgcgaacagtttggtgttttctcccacgcccattggaagcaaggagaagctgaagcttcgttgaaacttataaatatacgttgggctacggcatcgcccgcttcaattagttgggcttcctggtgcgcggctgcgaatcatgagagttggctatcaaacgcggtctatcgtgaatacaacgatgagcattttgcgcttcaggccgctattgcggggcatggcttgacgctggcgagcacggtcttggcagcagactatgttgcgaatggattgctgattccttacagacccgacatcaagattccgggcgcgcagttttcagccgtgtgcgtgccggggcgtgagcgttcaggtgccgtaaagcagtttctggcctggatggtcaaagtgatagccccctgccataccgattaccctgtcgctcgggatgacgcgtcgcaggctgtcactaagcgccgaacatcactggctatctgattagggtgtggagagcttgatcaggcgcgttcctataacaaaccctgatccgcacacaccttcaccacttgttcccgaaaccaggtattggcgctgtcctgcccactggtttcgttccactgcatatccagggtgaatcccggcaacccgttgggggcttcgcaaacgccgaatgccggcgccggtgccagcaatttttgcacgcggcggggcagggtgacgatgaagtcggtgccggcaatcatcttcaatgccgcgctgtagctgttggcccgcgcgatcacctggcgcttgcgggcctggcgagcgagccagccgtcgatcatgttggtgtcggaggtccaaggcgttgggaatacgtggcgccgctcaacgaaggattgcaggctgaacgcctgttccctgggcgccgagcgttggtcgcatacgcagaccaagtcgtcctccaacagcatctgggtcttgaagtctttatgggcgcggtgaaagttcgggccgaagcagatcaccaggtccagccgaccttcacgcaggtcgtcggcggggatctcggtttccagcttctgcacattgacgatcaccggcaggtcggcatggtcgaagcgcttaagcaggcgcggcaggatcaactgttcgaaatattctggcgcgcacacattgaaggtcaccgcctgttgggtcgggtcgaacgcttggccaccggcatgacacaggttgatgctttccagaatcttctgcacatgctcgtacatggtggtggccttgtacgtagggcgcatgcccgcgcgggtgttgataaacagctcatcttcaaagctggtgcgcagcttcttcaggctgtagctcacagtggactggctgacgaacagcgtttcggacacctcggtaacgctgctctggtcgtagacggcgataaacaccatcaaatcctgcatatcgagctttctgagcaagttactgtttagcatcggtttcgtccgtaaaccctttgtaccgaactcagtacaagactgagcaaaatgttaacggaacgcccgtaccaatagaaagctctgtaggacccttctatgtttcgtgtgggacaaaaaatgtttgtaatacgacgtcagcggatatgccgtgcgtaatgcgccgggttgaaacgcatcacgatcaatagcatcagcccgctcacggccatcaatgaccaccaggcccattcgaagctgcccaactggtcgcggatcatgccggcgatcagcggcgataggccggcgatcagataaccgatgccctgcacaaatgcggtaaggccaccggcgcgacgtgggttgtcgaggtggtccagggacaggatcaggctcatcgggaacaggccgccaatgcccaggccgagcaggcagggccacaacaggctccagcgttgcgggctgagaatgaggccgtagaaccccaggatgatcagcaccagcagcaccgccaccaccccgcgtttatcctggcggcggttggcaatggccggagtgaccaggccggagatcacttccatggcggtcaagaagcccagcagcaagccggcattctgttcactccagccctgctcgacgtagtacggcgccagccacgccagcacacaggtgtaggacgctgtgccgaggccaaaaaagatcgcgagcaaccaggcgcggcggttgctgaaaaatgcctccttggggccagaaccggcttgaggcaagggcggcagggccgaacgctgcgcataccagaacatcagggccaacaacgccagcatcgcccaaatcgccaggccgatacgccaactaccggtgtgggcttgcacccacggcgagaacgaagcagccaatgccgcgccgcccatgatcgcagtgacatacaggcccatgaacaacgagacgttggcgctgaaccgcgacttgatcagcgccggcatcaatgcctggatcagcgcaatgccgacacccgccgcaatggcactcacgatcaactccagcgccgaatccaggaacagccgcgacacggtcgccagcccaatcaccagcagcgacaccacaatgctgcgatgctcgcccacgcgcttggccaggcccatgccaaggaacatcgccaggcccatggccatgactggcaacatggtcagtaaggccgcgctgctgaaactcagcggcacatccgcgcgaatcgacgtcaataaaggccccacggccgccatcgacggacgcaaattgagggcgacgagcaccacgctgaccgtcagccatacggcggtggtggattttgcctgaacgttttccatgggcttgccttgaatgaacaagggcgaatcaggccatgcagcgtgtagcggggcaaatgagaaagtcgcaggggctattgaaaaaatgcggatgccgagtggtgaggtaagcgcgcattgggggtcggctatcaggccgccttcgcgagcaagcccgctcccacaatttgatcgcggggcgtcgggaagatatgggttgactgtcaggccgggattacagactcggcaactcccaccgcccctggtcgatttcaagcagcgtcggcccctgacgatcggcggcagcacgtaaagcagtgcgcaatgcttcaatgttatggacgctttgcgccgcgcagcccagggccttggccacaccgataaagtccggtgtgtagatgtccacacccaccggctcgatgtcacggttgaccatgtacttcttgatctcttcataaccctggttattccacaacagcacgattaccggtgtacgcgcctccaccgcgctggccagttccggcagggtgaattgcagcccgccgtcgccgatcaggcacaccaccggttggccatcgccgcgcccgagccaggcgccaatggcggcgggcagggcataacccagggtgccgtacccggtggaggcgttgaaccagcggcgtgggtggttgaggttcagggtcaggttgccgctgtacaccggttgagtggagtcgcccacgaacaccacgccgggcagttcctccagaacaacgttgagaaaccgggtttgcgcgcgcgtcgcagcgtcccatgcaggttccagctcggcccacaaacgggcgacgcgtgcggtgccccaatcgggcgagcgaggcgccaatggctggcggttcacttcggtgagcagcgcctgggcggcgatgcgtgcgtcggccactagcgcaacttgaggcgggtagttgcgcacgttctggtccgggtcgatatcaacgcgcagcagcgcaccgggaatgtcgaagccgccggcgaaggtgacgtcgtagtcggtttcggccaattccgtgccgatggccagcaccacgtcggcttcagccaccaaggcacgggtggcgagcagggtttgcgtggagccgatcagcagcggatgcgcggcgggcaacatgcccttagcgttaatggtgagggccacgggcgcgccgagggcttctgcgagacgggtcagttcggcggctgcgtcaatggcgccgccaccggccaggatcagcgggcgcttggcggcagccagcctctggctcatctgctgcacggccgccggtgctgcgccagcgcgggcgacgctgacaggcgtgctgcccagcaacgcgtcggcattttccaccagtacatccaggggaatctcgatatgcaccgggcgcggccgaccggcctggaacaccgcaaacgcccgcgccagcacacttggcagttccgccgccgacatcaaggtgtgggagaacgccgccacaccagccaccagcgcgctctggttcggcagctcatgcaacttgccgcgcccgccgcccagttggctgcgtgactgcacgctggaaatcaccagcatcgggatcgagtcggcataggcctggcccatggctgtggtgatattggtcatcccagggccggtgatgataaagcacacccccggcttgccgcgggtacgcgcatagccgtcggccatgaagccggcgccctgttcgtggcgcggggtgacatgccggatgctggaacgcgccaagccccggtacagctccaccgtgtgcacgccgggaatgccgaatacgtggtcaacgccgtaactttccagaaggtgcaccaatacttcgccgcaggtcgccatacaggtcgctcttgtgagggattcgaagcgccattggagcggttggccggtggcggcaacaatcgataaaaagtcatactcgccatgtcctcacgtcatggctggccccaatgaaacgcctcccaccgttacccgcgctgcacaccttctgggtcacggcccagtgctgcaacttcacccgtgccgccgagcaattgcacattacccagggtgcggtgagccgtcaggttgccgggctggaaagccagttgggctacgccttgttccaacgccaggcgcggggcttaagcttgaccgaagagggacgccaatggctgatgtgcgcgcagcaagtgtttggcttgctcgctgacgcggtggagcacgtcggtgaccggcgccgaaccttgcagctcaaagcgtccacctgcgtgatgcgctggttgttaccgcgcttgttgcaatggcaaaaagagcgccaggatgtgccggtggagctcaccacgacggtggcctataacgtggactttcgtcgtgagccgtttgacgcggcggtgatctacgggcccatcgccgagcagccggtcgaggcgcggcatctgttcgacgagcgccttacgccggtctgcgtgcctgggttgctgggcactttgcgtacaccgcaggatttgcagcatcacgtcctgttgcacccgacccgagacgagcgcgattggacgctgtggctcaaggctgccaatacctgcttgagcgatcccatccaacggcatcactttgaaaccctggacttggcaatgaccgtggcgtcccagggcactggggtggcgatgggcgacagtgcgctgattggcgaggatctgaaggcggggcggttggcgatgccgtttgagctgcgggtgtcgacggggatggggtattacttggtgtatccgccggggaaggagccgtcggttgggttggtcgagctgatggattggttggtcggtgaggccagtgtggggtgacggccaacgcctatcaaactgactcgccgcgatccaactgtgggagctggcttgcctgcgatgacggcctgccaaccgatacttctctccctgacaccccacaacccaactgtgggagcgggcttgctcgcgaaggcggcctgacagtcaacacggttggattgtgtgcatatccattgctgcggtaacggccacttagggttccgccctgacggcggctcacttttgaaaagcgcaaaagtaagcaaaacgctcttgccccaccactcggcacctcgcnnnnnnnnnnnnnnnnnnnnnnnnnnnnnnnnnnnnnnnngcatccctgccggtttaccccccaaatccctgtcgaattccggccagcgtggtttgacggggcgcctaagatcaagatcaaaagcagatcaagagcggctcgcttcgcatcgtggttagcgttgggtcagtagccgacggtgaagcgctggcgcgggtgcttcgggttttccacttcatccagcatggcgatggcgaagtcggcaaaactgatcgagctagtgccgtcactgctcaccagcagatcgtccttgcccaggcggaatttgccggtgcgctcggtgccgtcgaacagggccgatggcgacaggaaagtccagtccagttctttttcctggcgcagcgtttccaggaagtcagctccggcactggcttcagctttatattcagccgggaagccttcgctgtcgatcacgcgcccgccaccgggtaacagcagcgaacctgcgccgccgaccaccaacaaacggttcacaccagcctttttcaccgggccgattacggcgctggcggggagggtggagaagtgcgcggcgctgatcaccacgtcgctgccgctgatggcctgttgcaaggcctcggcatccagggcatcagcctgtttgaccgtaacgccagggcgcacagccagcttgtcggtattgcgggcgatggcggtcacggtatgcccgcgacgcagcgcttcttccagtagttggctaccggcacggccggtggcaccaatgattgcgatcttgctcatgatgttctccaacagggttaaggtttaaagccaattaccacttcatttcgcccttggcgactttggcgctcagctccagcgagctttcgtcggcaagggtggggtaacgttttttcatggccgcaatcagggcggcggaatccttggccttggcggtttcgagatcgaaggccttgatgtaatcggcggtgaaggtgaccgaggccagcgacggcttgcccaggtaatggcccggcaccacggtgttcggcttcaggtcttcaatgcgcttgagcgtagccaaccagtctttatgggattgcgcgctctgggtatcggccatccacacgtggatattttcagcgacgaccacaccaccgattacggccttgatcgacgggatccacacaaagctgcgatcgggctgcgggccgtcgaggcccaccacttcaagctgttgcccttccagggtcaggctgtggcctttaagcacttgcggcacaagggtcttggccggtttgtcggcgcccattttcgggccccagaaggccagcttgtcggcgacggtggcgttgatatggtcgaccaccggctgcggcgccagcaccttggcgtcggggaaagcggcggtcagggtgtcgaggccgaagtagtagtccgggtcgccatggctgatgtagatggtggtcaggtgcttgccgctggcgcggatcttctgcaccagttgctcggcttggcctttgccgaattgcgcatccaccaggatcgcgtctttttcgccgctgaccagcaccgagctgaccgggaagatcgcggcttcgcctgggttgtacacgtccagtttcagctctgtcgccgctgcgtgggcagcgaaggccagggcggcggtagccagggtcaagcgtttgaaggtcgagaacatcgggcagctcctgccatcggtaagggatgcacagagcttagttgcataaaacgcgacaaaaaatgcgatgcttggacatagtttgtttctgaaagcgggcaaatcatggatcgtcttcaagcaatgcgcgtgtttgtcaccgtggtggacctgggcagccaatccgccgctgccgaccaccttgacctgtcgcgcccggtggtctcgcgctacctggccgagctggaagactgggtgggcgcacgtctgctgcaccgcaccacgcgcaagctcagcctcaccgccgccgggggggaaacgctaccgcgttgccggcaattgttggatttgtgcggggatatgcaggccgccgtcagcgagcccgacgacgcgccccgaggcctgttgcgcctgagcgtgagcacctcgttcggccaggcgcagctgggcgcggcgattgccgaatacgtcaagctttaccccctggtgacggtggatttgcagatgcttgatcgcacggtgaacctggtggacgagcgcatcgacctggcgatccgcaccagcaacgatctggaccccaacctgatcgcccggcgcctgaccgtatgccgctcggtggtgtgcgccacaccggcttatctgcacgagcatccggcgccgcagaaagtcgaagacctggcccggcacaactgcctgacccactcttacttcggcaagagcctgtggcatttcgaagaaaatggcgaacacgtgtcggtgccggtccacggcaatatcaccgccaacgaggccagcacgttaatgcgcgtgacgctggccggggctggggtggcgatgctgcccagttatcaggccggtgaactgatccgcagtggagaattggtacgcttgctgccgcacgccgagccacgccagatgaatatctatgcggtgtacgcctcacgcaaacacatgccctcggcgctgcgcagcctcctggatttcctggtgctgcgcttccccgaggagcctgtctgggacgtcgggctgtgagctgaaataagcgcgctgaatggcatcgcatcatggcaagttgacctatgctttaaacagcaccctgtagatccgttcagaggtctgtgccatgagcatcaaaaccagaaagtacctgacaattttcaccctctgcgcattggcgacagcgctgtatgggactgccgcctatcgcgtcgagcaaacacgcatgcagccggcggcgttcgccatcagttgtcatcaggaccaatgcgttccgcgcaccggcagtttcagtgcactcaggtaggctgctcggccttcagttgttcacgaaacgccttgggtgaaaacccgaccctgcggcgaaacagccgtgagaagttggtcgggtcggaaaaccccagcacctcggacatttcgttgatggtcatgctggtgtaggtcagcaggcgcttggcttccagcaactggcggtcatgcatgatctgcaatgccggctgcccacccaactcccgacacgtcccgttcaagtgtgagaccgagatgcccagcttgtgggccaggtcttcaatcttggggtgttcgcggtaatgctgttcgaccagttgcgtaaaccgccgaaagtactcacgcccccgcggtgcgcgtggatggcgacgttggatcgcctggcggctgacccataccagcaacacgctgaccagggcgtgcagcatcatgtcccgtgccggttggtcatcggcgtattcgtcctgcaaacgcatgaacaggctgttcaagtaatcgctgtccttgcccgccgggtaactgcccagggtgtgcaggccatcgacggtagagcccagttgcgcctgcaagtggctgaccagcggcgccgaaagcgtcaccacaaacccctccacatcctcggaaaaacgaaaaccatgcacgcacagcggtggcagcacttgcaggctcgactcgttgagcgtggtgcgctggccttcgatttccagttgtgcctggcctttgtgcacatacagcaactggcacaggtccgcgtgccggtggggctggatttcccactggtattcccgactgcgccgggaaatggtttcgcagtgcaacaaatcgggagtcggccactgctggctttccccgtaaagcttgaagaccggaatcgcggttttggtcatggtttcaatccgatactcaggataagggttcggtaatcgccccgattggcgaaaagcacaggttttgacgcagttttcaccttcttatgcggctcgctcaagtgaaaaatgtcagccacaagagcaatgacaactctttcactccatacgttcgcgtgaagcttgaaggccataaaaataatgaaaacccttaaaactcaagtcgccattattggcgccggtccttccggattgctgctcggccagttgttgcacaacgctggtatccaaacccttgttctagagcgccagagcgccgagtacgtgcaaggccgtatccgcgccggtgtgttagaacagggcatggtcgacctgctgcgcgaagccggggtcagccagcgcatggacgccgagggtttggtgcacgacgggtttgacattgccctcaatggccaactcacctccatcgacctcaaggccttgaccggcggccagtcggtgatgatctacggccagaccgaggtcacccgcgacctgatggccgcccgcgcagccgccggtgccatcaccctgtacgaagcctccaatgttcaaccccatgacctgaaaagtgaacagccgtggctgaccttcgagcatgaaggccaagcctatcgcctggagtgcgactacattgccggctgcgacggtttccatggtgtggcccgccagtcgataccggcgcaagcgctgaaggtgttcgagcgggtctaccccttcggctggctgggtgtgctggctgacacgccgccggtacacgctgaattggtgtacgccaaacatacgcggggttttgcgctgtgcagcatgcggtcgccgacccgcagccgctactacctgcaagtgccggtcgaagagaagctggaagactgggcggatgaacgcttttgggatgaactcaaaagccgcctgcccaactccttggccgagcagttggtgaccgggccctcgatcgaaaaaagcatcgcgccgctgcgcagctttgtggtggaaccgatgcagtacgggcgtctgttcctgctcggcgatgccgcgcacattgtgccgcccaccggcgccaagggtttgaacctggcggccagtgatgtgagcaccttgttccgcatcttgctcaaggtgtaccgcgaagggcgcctggacctgctgcaaaagtactcggcaatctgcctgcgccgggtgtggaaagccgaacggttttcctggtggatgacctcgatgctgcatcaattcccacaggcggacgccttcagccagcgcatcgccgaaagcgaactggactatttcgttcactccgaggccgggcgcaaaaccatcgcagaaaattacgtcggccttccttacgagcctatcgaatagcctgctatcgtatcgagcattcccaccggtgaccgttgcctgtgggccctgctcgaaggttctgccgtgactcacctcaatcagcccgctccaaccgttcccgccgtgcgcagtatcctggtcgcgctgatgatggcgatcttcctgggggccctggaccagaccattgtcgccgtgtccatgccggccatttctgcgcagttccatgacgtcaacctgctggcctgggtgatctccggctacatggtggcgatgaccgtggcggtgccgatctacggcaagctgggcgacctgtatgggcgccggcccatgatgctgatcggcatgggcgtgttcaccctggcgtcgctgttctgcggcctggcgcaaagtatggagcagctggtgctggcgcgggtgctgcagggtatcggcgctggcgggatggtctcggtgagccaggcgatcattggcgacatcattcctccccgcgagcgtgggcgttatcagggctatttcagcagcatgtacgcggtagccagcgtggccgggccggtgttgggcggctatatgaccgagtacctgtcgtggcgctgggtgtttttgatcaacctgccgctgggcgccggcgcctggtacgtggcccatcgcaccctggtggggctgccggtaccgcagcgcaagcccatcatcgattacctcggcacggtgctgatgatcatcggcctgactgccttgttgctgggcatcaccgaaatcggccagggccattcatggcatgacgatcacgtgttggggttgctggcctgtgccctgttggccttgagcgcgtttgtgtggcacgaacgccgggcgcgagagccgctgctgcccatgcacttgtttgccaaccgcagcgcggtgttgtgctggtgcacgattttcatcaccagcttccaggcgatttccctgacggtgctgatgcccctgcgctaccagaccgtaaccggcgccggtgccgacagcgcggccctgcacttgctgcccttggcgatgggcttgccgatgggcgcgtatttcgccgggcgcatgacctcggtgaccggccgctacaaaccgatgatcctcagtggtgcgttgttaagccccctggcgatcctctgcatggcctacagcgcgccccaggcggtggcgttcaccgcgatcttcatgctgttgagcggcatcgcctcaggcatgcaatttccaacctcgctggtgggcacacagaattcggtggagcaacgggatatcggtgtggccaccagcaccaccaacctgtttcgctccctgggcggggcagtgggggtggcctgcatgtcggcgttgctgctggcgctgttgcacgattccagcttcgcccatctggcaaacggcgcactgatggccgaaggcagttccggcaacgtactgctcgacggcctcaacgccgcacccggcccggcgcaggatgcattgcgcggcgagttggcggtgacgttccggcatttgttgatggtgagtgcggcagtgtcgctgctggggttggcggctgcgatcgcgatgcccaaccgagtactgcgtggccgtgaagacaaagttagataagcggacgcggagcgtcccaggcggcgttcccacgcagagcgtgggaacgatcaggttcaggggctgtagtaacccaccgctaccatgaaatgcccgctcttgcgcacataagcgtgcttgttctcgaccttgcccgtcaccgggtttttccagcggtatttgtattcgccctggtcctgctcggccatcatcttgaggatcggcacacccaccggtttgccatccgggtccttgatcttggcgaaatcggtgttgatcaggcgcaggttggtgccgtgggcgacgtagcgccgcgtgttcaggtccaccacgaatacgtagagatcatcttgcaggaagccgccctgcaaagagttgatcgccttgagcgtgccggtttcgtccttgactaacgcctccaccgccttgttgcgcagcgcccgtgcctgttccggtgtggcgcgcggcaagtaataaccgaccgccaggatgcgttcgcccacgcgttgataaaacacgtgtttatgttcgaccttgccgtcattccagttctgccagcgatagtcagcctgctggataccctggccttcgggcacgctaagggcttgtttgaacgaggcttgcaggtcgggcccgagtacctcggacacatcgcgaccgatcagcgcggaggagggcccgccactggccagcagcacgccttttgtatcgaccacaaacacatagcggtcctggtcgatgaactcgccctgacggctgaaggcggcgaacgccttgtcaccttgcttgtggtagtacgccaaggccttttccagcagggccttggcggcttgggcatccgcttcctgtgccgtggcggcatgcacctggctgcaacacaacagcagcagccaagtgaatcggagcagtctcttcatttacccgtccctcgttcttgatggtgtgccaagagcgtagacggttggcggcaaatcagaagggtttggtcggcaggtatttgccgtccagggtgatgaccgcacgggagccgccgtccgggtcttcgactttcttgatgtccagtttgaagttgatggcgctgatgatgccgtcgccgaattgctcatgcaccagggccttcaaggtagagccgtagacttgcagcatttcatagaaacggtacatggttgggtcggtcggcacaccgctcgggaagctgccgcgcagtgggacgctttgcagcaggcggctggcgtcctcgtcaaggccgagtttgccgcacacgatgtcggccgcttccttgggcagcgggtgctggccgagcagggcggcggtgacgaatgccaggctcagcccggtgccgtcggtgagggcctgccacgacaggtttttgcgtgccttgaggtcgataatggtgtcggccagggccaggcgtggggtttgagcgaattgagattgcaacatggtgacgtcctcttgggttgaataaggttcaggcggcgtgggcgcgggtgctggggtggtcgagcagggagacgaagcgcccggtgtgcccgtccaaagcgtcaatgccgccggtttcgatgtcgtacacccagccatgcaggttcatccggccttgttccagcgccagggcgaccgaagggtgagtcttgagattagccagttgggcgaccacgttttcgcgcaccaacgaatccaggcgtgcagcgtccgaggcatgcgtacgggcggcattgatcaccttggccgactcggcatggcgcaaccagttggccacggcgggcaggtggtccaggcatttgcaggtggaaatcgcagtcatcgcgccgcagtctgaatgcccgcaaatcacaatgtcgctcacgcccagcaccgctacggcatattcgaccgtggccgacacgcctcccggctccgggccgtaggacggcacgatgttgccggcattgcggatgacgaacagatcaccgggctcctgctgggtcaacagctcagggactacgcggctgtcagagcaggacacgaacaaggtgccggggttttgcgtggtcgccaggtgtttgaacaagtcactgcgaggggtaaaggcttcacgttggaatttgcgaaagccgtcgatgagatgttgcatggtggttctccttgcgtcgctgatggggcaaggatggaagttttcggctatagcgtccaagaccggtttatgatgctatctataagctatgcctatagttggagcgctgcccatgctgttgcgtcatatccgttatttgctggccgttgccgagcatcgcaacttcacgcgggctgccgaggcgctgcacgtgtcgcaaccgaccttgtcgcagcagatcaagcaactggaagaaagcctgggtgcgccactgctggaccgcaccgggcgccgcatcagcctgaccgacgcggggcaggcgtacgtacgctatgcgcgcttggccttgcaggatctgcaggccggcacccgtgcgatacacgacgtgcaggacctgcgccgagggcacttgcgcctggccatgacgccgacctttactgcttacctgatcggcccgctgctggcacggttcaatgcgttgtaccccggcatcaccctgagcatcgaggaactgacccaagaccgtatcgaagccgcgctgggggaggacctgctggatatcggcatcggctttaccggcgagcatgggctggagatcgactgtgaggcgctgtttgtcgaagagctgagcctggtcgtcagtgccagtcatcgcgaacgcacacaaccggcctggctcgaacagcctctggtgctgctgaacacaggctttgccacccgccgctatatcgacgattactgccaccggcaaggggttaaaccgcagattgccatggaggccaattccatcagtgcgattatcgagattgtacgtagcacgcctctggcaactatcctgccccgggcactggctgaggcccaggcgggattgcatgcggtggtgatcgagcctgcgttgccgcagcgcactgcggccttgttgagccgcaagggggcgtatcgcagcgctgcgtgtgcggcgtttgtggcgttgatcaaggcgtaggaccgggctgacaccccagggtccaactgtgggagctggcttgcctgcgatggcggcccgccagccaacgcctttctacctgatgccccgcgattcaaatgtgggagctggcttgcctgcgaagacggcctgacagtcaacacagttggattgtgtacatatccattcctgcggtaacggccacttagggggccgccctgacggcgggtcactttggaaaagccccaaagtaaccaaagggctcttgccccaccactcggcacctcgcttgggctcggtgtgcccgtaatccgccagtgatttgggggccgccgccacgcgccatccatggcgcggggcggctaaaccggcatccctgccggtttaccccccaaatccctgtcgaattccggccagcgtggnnnnnnnnnnnnnnnnnnnnnnnnnnnnnnnnnnnnnnnnacggccacttagggggccgccctgacggcgggtcactttggaaaagccccaaagtaaccaaagggctcttgccccaccactcggcacctcgcttgggctcggtgtgcccgaacacaggcttgaatccgtgggccgccgccacgcgccatccatggcgcggggcggctaacccggcgtcctgccgggttacccacgaattcaagcctgcgttcggccagcgtggtttgacggggcgcctgagatcaagatcacaagcagatcaagatcaagagcggctcgcttcgcatcgtggttaccttggggcagcagcggctttttgtgtaggtacttatggcccaatcgcaggcaagccagctcccacatttagatcgcgccgaccacattcatggcgcagccaaccactgccccacaatccccgcatacgcccctgtcgccacattcaaatgcaaccactgatccacataactcttccaggcgacatcatcacgcggcagcaaaaaggctttttcactgtactgcatcggttgctcggggttgactgcacacaacccaggcttgagcttctgctgataacgcgcctcgctggcgtcggtgatcattacatcggccttgcccgtcagcagttcatcaaaaatcgttacgttgtcatgcaggcgaatctgcgtctggcccaagtgtgcacgggcaaacacttcgttggtgccaccggccggttcgatcactcgcacctggggctggttgatctgttccaccgtctggtagcgctgcacgtcggcgcagcgtaccagtgggatcttgccatcgactccgagcgactggctgaaaaaggcttttttctgacgttccaacgacacggaaataccgcccacggcgatgtcgcagcgttgggccagaaagtccggcatcagggttttccaggtggtgggtacccagttgattttggcgttgaggctcttggccagggactcggccatggcgatgtcgataccttcatagccgccgtcgctgcgcagcgaggtgtaaggcttgtagtcgccggtggtgcacacggtgagggtgccgcgtgcaatcacttcgtcaaggcgtgacgcggcggtgtcggcctgggcgacattggccaggcttgccagtacacagagggccagaggcgctttcatggagtcgaatccttagggcacggtcgaagccgccataatgcccgttttttgtaggagcgagcttgctcgcgaataacctgagtgcgccgctgtgaatcaggcatcccgcgttatcgttaacgatcctcgcgagcaagctcgctcctacaggcagaatgtttagccaaactgcaaccaaactccgtcaagcctgagttgacccgcgtatcccggcatgtgacgctcaggtatctctatcactgtgacttgcgcatgcacgcttgccccgatactcacaccgcgacattgccgtctgcgcttgcgttctgggccttgttccattgccgacacgcgcgcccgccagatacctctctcctacgttgatctacccacatggatgacgcgcacctgtgcgcatctgcctggcggcgcctgcgcgcttgcctgatgcaaacgtatgagaattcccatgagtgtttttgccagcctgcacgaagcccagaccttccttgaacagaaccccgacatcgaaatgttcgagctgtttatcctcgataacaacggcgtaccgcgcggcaagctgctgcaccgcgacgaactgctggcggtgtacgaaagtggtcggcctctgcccagcaccatcctcggcctgaccatcaatggcgatgacgtcgaaaactccgggctggtgtgggaggtgggggatatcgactgccgtgcctacccgatcagcggcagtttgcagcgcatgccgtggcgcttgatccccaccgcggcggtgcaagtgagcatgcaccccaccgaaggcctgcccgccaccgtggccgaccccaggcacctgctggccaaagttatcgaggcgctcaaggctgacggttactacccggtaatggcggcggagctggagttctatctgctcgaccagaagcccgacagcaacggccgtccgcaaccggcgcgggatgtggatggcaatcgcccgcgctcgacccaggtgtatggcctgcgcgaactggagcagatcgaaccgtttcttgccgacctctacagcgcctgcaagctgcaagggattccggcgcgcacggccatctccgagtacgcgccgggccaagtggaaatcaccctcgaacaccgcaccgacgcgctgcaggcgatggacgaagccgtgcgctacaaacgcctggtcaagggcgtggcgcacaagcatggaatgaccgcctgtttcatggccaagccgttcgacgacctggccggtacaggcatgcatatgcacgtcagcctggccgatgcccagggcaataacctgtttgccagtgaagcggcagacggtacgccgctgctgcgccaggccgtgggcggcatgctcagcaccttgctcgattcactgttgatgttctgccccaacgccaattcttatcggcgcttccaaaccaacagctatgcgccgctcgcggtcacctggggcgtggacaaccgcaccgtcagcctgcgtgtgcccggtggcccggcccagtcccggcatatcgaacaccgtatctgcggcgccgacgccaacccctatctggcggccgccgcaatcctggccggcattcaccgaggcatccgcgaacagctagaccctggcgccccggtggaaggcaacggctacgcccaggccacggagctgctgcccaccgactggctgaccaccttgcgcgcgctggaaacgtcccgctgggcgccggacgcgttcgggcgtgaattcctcggcgtttacctggcggtcaaacgtgccgaataccgccagttcatgggcgaggtgggggagcaggattggcgctggtatttacaccaggcatgatcgattttagcgggtaggggctttcgacctttttttcacgttgcggcggttaagctgcgaatcaaggtcgtttactaccgtttcattcacatgagcccgcgatgtcgccacaacctccatcctccatcgagaccgaattcaccgagcgctatgaccgtgagcatgccaggggctgtggcgacccgcgtccgcccaggctgttgcagcgcctgtcggcgtggcgcgatgcgcggctggtgcgccaagcgctgaaggtggcgggcgagcctgggcttatcctcgacctggcgtgcggttccgggcgcttctggccggtgctggccgaacacgtcaaccgcgtgatcctggcctcggacaactcccaggcgatgctcgatcacgcgcgcacccatcacccgggcgcgttgctcaagcgtgtcaaaacattccagggctcggcgttttccattggcctttcggcaaatgcggtggactgcattttctgcctggatttgtttcggcatgtgcccgacagcgatgcacgactcatgttgttgcacgagtttcaccgcgtcagccgcgacaccgtgatcgtggccgtgaacgtgggcacgcccgtagagagcgagtttcgccaagccggcttcaaaatcctcaattaccaagagttcctgccgggctcgcgactatggtgcgtctacgttttgcgtaagagaggataacgcccgtttgtcggactattcttcatctcctgtcggagttttcatgatggcgtgtgcactgcggatgctcgcaagcctctttcgcgatatatactgcgcgccattcttcaagggagagccgtgtggccatcgatattcactggatctgcgacaacgatagcctcggccagcattgcgccgaatggcagcagttgccattcgtcgccctcgacaccgaattcatgcgggtcgacaccttttaccctattgccgggctgatccagatcggtgatggcgtgcgcgcttacctgatcgaccccctgaccatcgacaattggcaacctttggccgccttgctggaaaacccagcggtgatcaaggtggtgcacgcctgcagcgaagacctggaagtgctgttgcgcctgaccggcagcttgccggtgccgttgttcgacacccaattggcggcggcgtacctcaacctcggtttctccatgggctactcgcggctggtgcaagcggtgttggacatcgagctgcccaagggtgaaacccgctccgactggctgcagcggccattgtcggagacgcagatcagctacgccgccgaagacgcggtgcacctggccgaggtttacacccgcctgcgcccgcaactgtcggacgacaaatacgcctgggtattggaagacggcgccgaactggtggccaacctgcgccgcgagatcgacccctacgagctgtaccgcgacgccaagctggcgtggaagttgtcccgtgctcaacttgcggtgctgcgtgaactgtgcgcctggcgcgagcagcaggcccgtgctcgcgacttgccgcgcaaccgcatcattcgcgaacactcgttgtggcccctggccaaatcccagccggataacctcgctgccctgggcaagatcgaagacatgcacccgcgcaccgtgcgccaggacggccagttcctgctggacctgatcaaacgcaccgccagcgtgcccatggaccaatggccgcctgccgtggctgagcctttacccgtggacgctgcagcgttgatcaagcaactgcgggccctgggccaaaccttcgccgagcgcctggacatggcgccggaactgatgctgcgcaagaaaaccctcgaagccctggttaaaagtggctaccccgatgggccttaccaattgccagactcgctgcgtggctggcgccgcgagttgatgggccaggcgctgctcgacagcctggccaatgccggagaacagccttgaaacgtatttgctccatctaccgtagcaagaaaaaagacggcatgtacctctatgtgctcaaaagcgacgccctggagcgcgtgcccgagccgttgatggaagcctttggcaaggcgcatcacgcctttgacatggtgctgacgcctgagcgcaagctgtcgcgcgaagacatcgccgtggtgctggaaaacctcgacaagcagggctaccacctgcaaatgccgccggccgaggacgagtacatcgagcacttgcccgaagagctgctgcgccgcaacgacccgatgtgatcaccagtgcccgcctcagggcaccgtttcaatggaatcgtattagaggacggtggccgtaaggatgcgggcggccgtctgcactgttttttcaaaggtttgaaccatgcgtgttctgattgctgaacaggatcatccgctctacgcccaattgctcagggacgccgccccagaccttgaagtgctgaccagcggcgactcggccgaactttcgcgcctggccgccgactgcccggtgtggctgggccagcccgatctgttggcgaccctgctgcgccagggccatcacccgcaatggctgcaatcgacctgggcgggcatcacgccactgttggccgatggcttgccccgcgactatcgcctgacccgagcggtaggcatttttggccaggtcatggccgagtttgtcctcacctacatgctgggccacgagcgcgaagtgctggcgcggctggtcagccaggtggagcgcaagtgggataaccgcatgggccagagcctggccgggcgcaaggcgctgatcgtcggcaccggtgacattggccagagcgtggccgagtttctgctgccattcggcgtgcagctgtatggcatcgccagccaggcccgcgagcaggcgccgtttatcgaagtggccgggctcgaccagttaggccggctggtgggggaggtggattacgtgatcaacctgctgcccaacacgcctgatacccatgacctgtacgacgcggcgctgttcaagcagttcaagcccaccgggttgtttatcaacgtcggacgcggcgtggcggtggtggacgccgacctggtcgaggcgctcaaagaagggcacctggccggcgcggtgatcgacgtgtgccgccaggagcctttgccgcaacgccacccgttctggacggcgtggggtttgctgttgaccgggcacagctcggccccgacctcgccgccgatgatggtggaattgtttgtacagaacctgcgggcgtatcaggccaagcaagcgctgcgcggggaagtggatttcgagcgcgggtactgagcttgccccatgccctctgtaggagcgagcttgctcgcgaagaacgtcaacgatgacgcgtactttctgaataaacgcggcgcctgtgagtttttcgcgagcatgctcgctcctacagagggtcagagtgcgatgcttagaggctgaagtcaccctcggacaccagctcgctcaacggcttgcgcgggctcggcatttcgcgcccttgcaggtactccggcaaactcgacttgtcccccaacttgcccaccgccacggccgcatgcagcgcataaccctggggaatcttcagctccttgcgggtcagttcctgatcgaaaccggccatgccgtgggtgtgccagccactgaggctggcttgcagcgccaggtggccccaggctgagccggtgtcgaaggtgtgccacagcgccggggtttcttcggtggcgccgggggcgatgaagtcggttttcgacgcgatgatcaccagggccgacgcatgctgcgcccaattgcggttgaattcattgagcaggcccaggaaacgcgcccaatccggcgtgtcacggcgcgcatacagaaaccgccacggctgcgagttgtaggccgaaggtgcccagcgtgcggcttcgaagaaactcagcagcgtctcctgcgggatgctctcgccggtaaaggcgcggggcgaccagcgctcggtgaattgggagtggatcggataatcggcaacgcgggggttattgctcatggacagatcctgatgaaaaaaccgggattcaaagctactgcgcccacccctgcctgacaagtcttgcaacaccgtcagtcgtaagcgcttggccccaaccggcttgggcactagactggcggccttttcaccttccgatactgatgcagagccatggccgccaaagtcgaacctttctggatacgcaaaacccttgagcacctcgaccaggaggagtgggagtcgttgtgcgacggctgtggcctgtgctgcctgcaaaagcttgaggatgaagacgacaacagcgtctattacacgcgcatcgcctgcaaactgctcgacctgaaaacctgccagtgcaccgattaccccaaccgccgcacctcggtgcccgactgcatccagctcacgccgggccaggccgaccagttcaaatggttgccgccgacctgcggataccgcctggtcagcgagcgcaaggacttgccgctgtggcatcacctggtctgcggcgaccgtgacgcggtgcaccacgaacgcatttcccagtccgggcgcatgctcagcgaaggcagcgtgcccgaggatgactgggaggattacctgattttccgcgcaggctgaacgaggagtgtgtatgaaggtggccgccaagtgggcagcgggcctggtcgtgctggcgctgagcgggccgggctggtgcgcgaagaaagtcgacctggattaccacatcaagctgttgccccaaagccagcaggccgaggtgcgcgtcagcctgtcccagggcgcggcggtgcgcagcctgaacttcgacctgggccgcgacggtgactacagcgacttcaaggccgatggccagtggcaggtcaccggcaaccgtggcctgtggcaacccagcgccgacaaggccagcctgacctaccgggtgcgcctggcccatgcgcgcaagcccggggtttatgacacacggatcacgcccggctgggcgttactgcgcggcgaagacctggtaccggccgcacgtctcgatcagcaagacggcatcgagctggtctcacgcctgctgttcgaactgcctaccgggtggaagagcgtcgaaaccgcctggccgcgcatcggccaaaacaaattccgcatcgacaacgtgtcccgcctgttcgaccgtcccaccggctggatgctggcgggcaacctcggcagccgccgcctgcgcctgggtgaaaccgacgtcaccgtggcctcgccaaagggtcagggcatgcgccgtatggacgtgctgacgctgctgacgtttgtctggccccaggtggaagccgccttcccgcgccatcccggcaaactgttgatcgtcggcgccagtgacccgatgcggcggggggcttattcactgcgcgactcgatctacctcaacagccgcacgccgctcgttggcgaaaatggcagcagcccgttgctgcgcgaagtggtacaggccatcgggcgcttcaacgaccacgatagcagtgactggatcagcgagggcttgggcgagtactacgcgattgaactgatgcggcgtgccggtggcatcaccgatgaacgctatgcggcgatccaggcgcggctgaccaaagaaggtaaagacgtcactacgctcaaaggcgagcacgtcaacggcgcgacgctggcgcgttcggtggtggtgttgcaggagctggaccgagagatccgcgtgaagacccacaacaaacgctccctggacgatctggcgcaggcagtgatgcgggtgaacagcatcaacaccaaagagttcgtgcagttggccgagagcgtgatcggcgagtcgtcggtggtgctggacagcaaactgctgcgctgattcctagccctgtgcaattcaacatgtgggagggggcaagcccccctcccacatttgaatctccagcatgtccaagtcttagatcaggctttaggtttcaccaccttttcagccgccacttcagccttggtcttcaggttcttcaactcttccccggcgcgctcgattttcgtgcgcacgctgttcatttcctggcggccctgttccagtttgtccttgagcgaactgtgcccggtaaagccacgggccagtgccacgccaccaatcgccacctggatcaagccgaaaatcccaccgcggcgcaggcctttacccaccatcatcactccgccggccactgagccgatgcgttcccagccatgcacgttctggttgggttgaggtttcaacggtgtggcttcgatgacaggtcgcaaggttttgctgtcgctcatgatcagtctccaacaagggcaagtgttactagctgactgcgcgcatgtgccggatgttcccgcaagatcagtacttggggcccgaacgggtgttgttgcccttggccaggcggtcatagagcaccacgttgaccgtggccgccaggttcatgcagccggtggtggggatgtacaccacgtcctcgcaccagtcgcggatctctttgtccagggaaccgtcttcggggccgaagatatacagcgcgcggtcggggtgagtgtattcaggcaacgggcgggcgccttcgaccaattccacggcgaccgggatgcaacccaggggcaggatctttttcaggtcgtcgatgccgatcagcgggatatcgtggtgcaccttcttggtgtcggtgatgaaatcccgggcgcgctcgtaacgcacgccggtgtagaacaccgaggccacgccgtagcagccggcggcacgcatcaccgagccgacgttttcgggggatttggggttatacagaccgatgcagctgtagcgtttattgcccacggggaagggtgccttgagaaaaacggcgattatacggcctggggggatgcagtgcttggacgatcgtcatcgcgggcaagcccggctcccacagggaaatgcattcctactgtgggagctggcttgcctgcgatgaggccggaacaggcaaagaaaagcctcagtcgtccttcttcatcaaccccgccaacgccgcaaacgggttgtgcgttgccttggcaatgctcgggctgctggtggagccttcgccgaagtactgctggtcggtgtagcgcgagtgttcgttgtcgtggcagtacaggcacagcaactcccagttggaaccgtcctgggggttgtcatcatggttgtggttacggtggtggacggtcagttcacttaagcgcttgccggaaaactcacgggcgcagcggccgcacacatgggggtacatcttcaaggctttatcgcggtagcccatttcgcggtcgcgctgggcatcggcgaggatgcggtccagcttagcggtgtgggagggcgggttgttcgagctcatcatggctcctggctattattgggtggttcacggatagggttgattctagccgctcccacaggggattggcgcgattgaatcaaccgtgatcagcccttgagcttctctgcaatccagatggtatgccgcgtgcccttgttgccatgggcaaatacttgcacttcctcggccttgaagccggccttgcgcagtttgtcactgaacagcttgtcggcgctggccgaccacaccgccagcacacccttgggccgcagggccttggcgcacgcggccaggccactggccgagtacagccaactgttggctttttgcgtgagtccctcggggccgttgtcgacgtcgagcataatcgcgtcaaagccttggggttcggcctgcagtaccttggccacgtcttcctggcggaccacggtgcgcgggtccagcagcgggcgaccggatttctcccccagcggcccacggttccattccacgacgccgggcaccagttcggccaccaccacttcggcgctcttgcccaaatgcttgagcgccgcagccaaagtaaagcccatgcccaggccgccgatcagcacccgtgaacccaggcgaccggccaccttgcggcagggaatctccgccagggcatcttcggagccgtgcatgcgcgtgttcattaactggccgccgtcaccgccctggatcttgatgacgaagtcctcgccgtattcgaacaggcacaaggcaccgccgttgtcggggattggggtggtgtccagcagaacgaaacgtttcatggaaatctcattgggaagggcattcttgcgcggttgggagtagccttaaggcattccggtcaggccatggagccatcgatgaagtgcagcattctaacggtcattgtgttgagcgcgctcgcattgggtaccgcgcaggctcaggagttacaaaccgtaccggtcgcgcccacggcaaccccaggcgcgccgggcacgccaacgcccacgttgtacccgcaagtcacgccgcccgttgcgcccaagacccataatggctcgccaccgctggcgcccatcgtgctgccggcaccgcccaaggaccagacggtccctggcctgcagcagaacgacagcaagccaaagacgccaggcggttagaccaggccgagggccttgaacacaaaggcatattcgagggcgacgtcacgtagcccctgatagcgcccgctcatgccgccatggccggcgcccagttcggtcttgagcagcagcaggttgtcgtccgtcttggtatcacgcagcttggccacccacttggcggcttcccaatattgcacacggctgtcgttatagccggcgatcaccagcgtggccgggtaagcctgggcgctgacgttctcgtagggcgcgtaggccttgatgcgcgcgtacacctcggggtcttcggggttgccccattcgtcgtactcggtgatggtcagcggcagttccgggtcgagcatggtattgagcacgtcgacgaacggtacttcggcaatcgccgcctggaacaattccgggcgctggttgagcaccgcgccgatcaacaggccgccggcactgccgccgctgatcgccagttgccgggaggtggtcaggccctgggcgatcaaatgctcggcgcaggcgataaagtcgctgaaggtgttctgcttgtgttcctgcttgccgttgcgataccaggcttcccccagctcaccgccgccgcgcacatgggcgatggcaaacgccaccccgcggtcgagcaagctcaggcgcgcatgggaaaaccacgggtccaggcttgagccgtaggccccgtagccatacaggtacagcggcgtcggcttgccgagctggtcacgtttgaccaccaggctgatgggcacctgggtgccgtcggcggacgtggcccacaggcgttggctgacgtaatcatcggcgttgaagacgcccagcaccggggtttccttgagcacaacctgcgcgcctgtcgccaggtcgagctggcgcacttgggcgggacggttcaaggcttcatagcgcaggcggatcttgtcgctgggaaactccaggctgttctgcacgtaaaggctgtaggcggcgtcaggcaattgcacccgataggccggcacgttctcggggtgtacttcgataaccggcaggccaccaatgcgcaggctcaaggtcatggcgttggcgttcaggctcacgccgtcgagcatgacctcatcgctgtgggggaccaggttctgccagtcggcttcggtgggcggcgtgccggtgtcggcggccacgtacagtgcatggttgatgccgtcgcggttgctgcggataaaccaggtccactggccattgcgcttgccgtggtcgacatcgtattcgtggtcttcgacccgcggcgccaggcaggcgaaggccaggtgcggttgctcggcgtccagcgcccagacttcgctggtggtcttgctgcccagggccagcaacagttggcgttcggagcttgagcggtagcaatgcaggaagaaacggccgtcgggctcgtggaagacttcctgcgcggcggtgccgtccaggcgatagcgatacagtttgtgcggacgatgggtgtcgtccagctcaccgaaaaacagcgtcaggctgtcattggcccaggtcatgctgccgtcgcagttgtcgaacgccagttcgctgaccttgtcggtcgccaattccttcacgaacagggtgtaaatctcttcgccactggtgtcgaggctgtaggccaggcgttggtggtcggggctgatgctgaatgcgcccagggagaaaaagccgccattggccagtacgttagggtccagcaacagttcttcgctgctggcgtccacgtggttgctgtcatcggccgggcggcggcagcggtagtggcgggcgtattcgtcgccggcggtggtgcgggtgtaatacaaatacgggccccaaggggagggcagggacaggtcggtttccagaatgcggcccttgatctcgtcgaacagggtctcgcgcaacgcctgctgatcggccagttgcgcttcctgccaagcgttttcgaccttgaggtagtcgagcacctcagggttgtcgcgttcttgcagccaggcgtacgggtctgggcctggggccttgcgggcaatcggtgcggtggaaataggcatggataattccctatctggcagacggtggcaggcattgcagccgcgacacgcaaaagccgttatcatagccgcctgtttgccaaccttgccatggacaccatgaccgagaacgactatctgaccgcttggggcctttacgccttcgccgctttgggctgcctgttggtgtggtggcgcatgacccgctggatctggcgctggctgcgcgagcccctgcaattgctggtggcggtgttgctgctcagcccgaccatcgtcgacccggtcaagacccagtttgcgccggccgtggccattaccgccctggacctggtgctcaaggtcggcaacaacgcctggcgcgccatttccgacctgttcatgtacacgatgatcgcgtttgccctgtacatcgtgtttgtgctgatccgctggcccatcgagcgcgccgccaacgctcgtcgtgagcgcaaggcggctgcggatgcggctttggccgccgagccggaagacgacgaaccgttccgtcgcccggcgcctgccggtggtatgcgggtcgagccgcgcctttaacgttgtttgccctgcagcgagagccctggcatgtgtgaattattgggcatgagtgccaacgtccccaccgatatcgtgttcagctttaccgggctgatgcagcgcggtgggcgtactggcccgcaccgcgacggttggggcattgccttctatgagggccgtggcctgcgcctgttccaggacccggccgccagcagcgagtcggaagtcgcgttgctggtgcagcgttaccccatcaagagcgaagtggtgatcggccatatccgccaggccaatgtgggcaaggtcagcctggccaatacccatccgttcgtgcgcgagctgtgggggcgtaactggtgttttgcccacaacggccaactggcggacttcaatccccgcgccaccttctaccgcccggtgggcgataccgacagcgaagcagcgttctgcgacctgctcaaccgcgtgcgcgaagccttccccgagccagtggacattgagcaggtgctgcccgacctgatcgccgcctgcgccgaataccgctgcaaaggcgtgttcaactgcctgctcagcgacggcgactggctgttctgctactgctcgaccaagcttgcgcagatcacccggcgtgcgccttttggcccggcgcgcttgaaagatgtcgatgtgatcgtcgattttcaggctgaaaccacccccaatgatgtggtaacggtgatcgccaccgagccgttgactgacaacgaaaactggacccgctacgaaccgggccaatggagcctgtggcgacgcggtgaatgtgtcagccagggcgttaccgagtaaggaatcgagcatgttgctgagctatctgcggttggtattgtttgccgttggcttgttggtcggcgtgcaggtgcctgggtttatcaatgactacgccaagcgcgtcgaggcccacctgatcgaggcgcagaccggcttgcgcggtttcgagtccacggcgcagcagttcttcaacggtgatatgcaagccttggtggcgcattaccgcgccagcgatgacccggtgttccagagcgacgccagcagcctgggcgccatgctcgaccgccagctcgagctggacaagcaattccaggccatgcagggtccgtggtacatccgcgccctgcaagtggccgtggctgccgacccggatatccgttcggagacctggaatggctacagctaccagatcttgctgacgcccgaagccatgggctggggcctgggcggggcgatgctgttgtcgttcggcatcgagtgcctgtaccgcttgatcgactgggtggtgctgggtggtcggcgcctgcgccagagccggcccatcgaagagcgggacctcaagggcctctaacgacccactgatcgttcccacgctccgcgtgggaatgctttttctgacgctccgcgtcgcgcgtgagggcgcagagcgccctgtgctgcattcccacgcagagcgtgggaacgatcagtcgggtttattcagttgcatgcgttctgcaccgacttgctcggcatagcgggcaacgactttctggcacaaccccacaatctcctccaccaactccacccccacacgccacgacaccaccacctgcaagttcggcagacgctgggccatgggcagcatgaccaattcccctcgctccagttcttcgctcaccagcaccggtggcagcgcgccgatgccgaagccatcgcgcagcaaccgggtgatcgccgacaccgagttcacgcagttcatgcgcggtgcggccacgccattggcctgcatcaaactcaatacgtcctgatgcgggtgagagtttttcgagtaggtgatgatgcgttcctgggccagttcggcgagggaagcgtagtcgcggttgtagatcgactggctggccacgatccaggccatggggtggctggccagttccaggctgcgcacggtttccaggcgcagcaggtcggtttgcaggatcaggtcgaggaaacctttttgcagttgatcgctgaggttcagcgcagtgtcggcgaccagctcgatttccaccagtgggtacagcttcatcagctcagcaaccagcgggcttagccaggtgtggatcaccgtgtccattgcgccgatccgaatgcgcccaaccttgctgctggtggtctccagggactgcttcaagccctgcatggtcaccatcatctgctcggcatagtcgagcactttcaaaccttccggggtcaggctcacgccacgcgaatcacgcaggaaaagtttcacccccagctcgctttccagcaccgcgatgcggctggagatcgaggcctgggtggtgaacagcttctcggccgtgagccggaagctcttgagcttggccacccagacgaaggtttcgaggaacttcaaattcatgggatcaactttttcttatgcatggatcggtttttattagttggacgtcgcaccgggcaagcgccaaaaatcgagctattgcacgataagcgtcgttggggtgtcaggacaagttgcgagttctgcgtaaaaaatcccacactacaagaaaacaaatcctacaggagcgacccccgtgagccgcctgctactgaactgcgacatcggcgaaagctttggcaactggaccatgggtctggacgccgaagtcatgccgttcattgattgcgccaacgtggcttgcggtttccatgccggcgacccgagcatcatgcgcaagaccgtcagcctggcgttcaagcacggcgtgcaagtgggcgctcatccggcctaccaggacctgcaaggcttcggccggcgctccatgaactacacgccgcaggaaatccaggacctgttgcactaccagatcggtgcgctggacggcatctgccgcgcccagggcgggcgcgtcagctatgtgaaaccccacggcgcgatgtacaacgacatgatggccaaccccgcgcagttgcgtgcggtgatccaggccgtggccgcttacggcgacctgccgctgatgctgctggccacccgcgacaaccgcgcggcccagcccttgggcgacgaatacggggtgaccctgtggttcgaagccttcgctgaccgtgcctatgacaataacggccatctggtgtctcgccaactgcccggcgcggtgcatcacgacgccgacaccatcgtgcagcaggccctgacccttttccgtggcgaatcgctgattgccagcgacggcagcccattggtgctacaagccaataccctgtgtgtgcatggcgacaacgccagctcggttgctgccgtgcagcgtatccgcgaagcgttgaaaacagcatgaacccacgcattgaagtggtggcgatcgactgcctgatggtgcgcctgtttgacgtgatcgccgaagccaacatgccgtggatgctcgcggctaccgagcgcctgcgcaacggttttggcccggccttggtggacctggtgccgtcctacaccaccttgatggtgcattacgatctcacggcgctgaccccggcccaggcccgggcgctgatcgaccaggccctcaccgatctgcaaccccaggcgcagggcagtggccagtgccatgtgctgcccgtgtggtacgacctgagtgtcggcccggaactgaccttgctgtcccagcgcagcgggctggccgtggaggaggtgatccgccgccacagcgcccacgaatatcaggtgttcgccctcggttttgcccctgggtttgcctttatggggctggtggacgaagtgctcgccacaccgcgcctcaacacgccgcgcaaacgcgtggccgccggcagcgtcggcatcgctgaacgacaaaccgccgcgtacccggtggtgtccccgggcggctggaacctgatcggccgcaccccggccaaactgttcgaccgggagcgcgacggctacagcctgatgcaacccggcgacacggtgcgcttcgcctcggtcagccacgccgaattcatccacttgggtggcgacgacacgccgctggaggcgcaggcatgagccgcttgatcatcgaggccagcacgccgctgtgcctgttgcaggacgccggtcgttttggcgtacgccacctgggcgtgacccagggcggcgcgctggattgggtgtcgatggcctgggccaactggctgctggacaatgccctggatgcgccggtggtggagatcaccctggggggctttaccgtgcaggccgaggattattgcctgctggccttggccggtgcggacctgggcgcctatgtcgatgagcgtgcgataagccccggtcgcagttttatcctgcaaaagggccagcgattgcgcttcacccagccgttcactggggcacgcgcttatctggccgcgcccggtggctttgatgcgcaggctgtactgggcagttgtgccacggtcgtgcgcgaagcattgggcggggtggacggttgcggcaaggcactggccgaaggcgggcgtttggcgtattccggtacgggcggtgcaatgaaggtgctggccaacccggatgtgcaatccgctgcatcactggacgtgatcatcggcgcgcagataggccagttcagcgggcagagcctgttcgatgctttcaacaccgaatgggctctggacagccgtgcagaccgcatgggcatgcgcttgctcggcacgccgttgcagtatcaggggccgtcgttgatttccgaagggattccattgggcgcgattcaggtgcccccggatgggcaaccgattgtgttgctcaatgaccggcagacgatcggtggttatccgcggttgggcgcgttgacgcctttatccttggcgcggctggcgcagtgcttgccgggggagaaggtgcggttggcaccggtggtgcaggaggcggcgcatcggcagcacatcaagtttttgcagcgctttgctgactgctaaaagcatcgcaggcaagccagctcccacatgttgactgcatttcaaagttggaatgcattcctctgtgggagctggcttgcctgcgatgaggccggccgggacaccaccgcctatttggagagaacacgcataccttcttccaacccgcgcagcgtcagcggatacatctgatcctccaccaactcgcgaacaatccccgtcgacgctgtatagccccaggtatctttcgggtaggggttaatccagatcagcttcttgtacttggccatgaagcgctgcatccacacataccccggctcctcgttccaatgctcgacgctgccaccggcctgagtgatttcatagggcgccatggccgcatcaccgataaagatcactttgtagtcggcgccgtacttatgcagcagatcctgggtggacgtgcgctccgaggtgcgacgctggttgttcttccacaccgactcgtacacaaagttatggaagtagaagtactccaggtgcttgaactcggtcttgcacgcggagaacagctcttcgcagatcttcacgtgggcatccatcgagccgccgatatcgaacagcagcaacagcttgatggtgttacgccgctcggggcgcatctggatattcagcaagccggcatcgcgggcggtgtggtcgatggtgccgtcgatgtccagctcttcggccgcaccctggcgcgcaaacttgcgcaggcggcgcagggcgatcttgatgttgcgcgtgcccagttctacctggtcgtcgaggttcttgtactcgcgctggtcccagacttttaccgccttgccctggcgcttgccggcgtcaccgacgcgaatgccttcggggttgtagccaccggaaccaaaggggctggtgccgccggtgccgatccacttgttgccaccggcgtggcgttctttctgttcttccaggcgtttcttgaattcctcgatcagcttgtcgaggccaccgagggactggatctgcgcgcgttcttcatcgctcaaggaacgttcgaactccttgcgcagccattcttcggggatcagtgcctgcaggtggtcgtcgagcttttccaggccgttgaaataggcgccgaaggcccggtcgaacttgtcgaaatgccgctcgtccttgaccaggatcgcccgggccaagtagtagaactcgtccatgtcggcgaaggtcacgcgctgtttgagcgcgttgatcaggtcgagcagctcgcgcaccgacaccggcaccttggcggcacgcatctcattgaacaggttgagcagcatcagcgattaccgcgacggctcatgaacgccagacgctccagcaactgcacgtcttgctcgttcttaaccaaagcgccggccaggggcgggatggccttggtcgggtcgcgctcgcgcagcaccgcttcgccaatattgtcggccatcagcagcttgagccagtcgaccagctcggaggtggaaggttttttcttcaggcccggcaccttgcgcacatcgaagaacacatccagcgcttcgctgaccaggtctttcttgatgtctgggtagtgcacatccacgatcttttgcagggtggtgcggtcggggaaggcgatgtagtggaagaagcagcggcgcaggaacgcgtccggcagctctttttcgttgttggaggtaatgatgatgatcgggcgtttcttggccttgatggtctcgtcgatttcgtagacgtagaactccatcttgtcgagttcttgcagcaggtcgttggggaactcgatgtcggccttgtcgatttcatcgatcagcaggatcacccgctcttcggactcgaaggcttcccacagcttgcccttcttcaggtagttgcgcacatcgtgcaccttgtccacgcccagttgtgagtcacgcaggcggctgaccgcgtcgtactcgtacaggccctggtgtgccttggtggtggacttgatgtgccaggtgatcaacctggcaccgaaggattcggccagttgctcggcaagcatggtcttgccggtgcccggttcgcccttgaccagcagcggccgctccagggtgatggcggcgttgacggccagtttcaggtcatcggtagccacataggcctgggtgccttcgaacttcatcggtcattcctcgaattcatcaatggcctgactataccgcgcagccccggcgactgtgaacgcagacggggcattcagtctctgaatggcgggtcacatcagccctggcccatgcaggacgtgtgggagctggcttgcctgcgatggcggtgggtcagttaactaatctgtcgctgatacaccgctatcgcaggcaagccagctccaacagggttaatcagcgctgggcttgggctgttcgtaacgggcattgaacgcctggataaacccattgcgcagaatcgcgatcaccgccgaaaacgcactgacattttgctgatgcacgctaccgctcagctctacacgggtggcgaactggtttttacgctggtttttcagcacggtttcgctggcgcccaccacggcttcccagatcgagcggaagatattcttgtcctggttttcaacgtcttgttgccagtcgaacacctccacatcgcgcagcagcggcttgatgtagccggtgagccggccattttccgcctgggcttcgatcaccacatcgcccgtgccggccttgaagtcgaacttgccataggccgatgcgaagtcattcatgcgcttgagttgcaggtcgcgggcgcggaagcggaactcgaactcttcgaaatcgctcagcggatcaaaggtggcgttggcctccagaggcgcctggccttgcaggagtgccttgccttcgaagcgggcgtcgcgcttgcctttgacatccaccacattggtcaagttatagaagctggcgttgaccccggtggcgttgatattcacctggggcttggagctgaagttatggaaggcgatctcaccgtcttcgatgcgcacttcgttgagggtgatcggtaacagtttgcgcagttgctcctgccagtcggtgcctttaccggtctgggacgcctgcttgttggcaccgccatcgacaaagttgatctgcgggcgcacaaaatgcccctcggccacgacggcatggtcgtaccacagcgaatgccagctcaccgcgaactcgatcagcggtgccttgacgaacggcaccgggaccttgccgtccaccttgacgatttgcaggccattgatccggtaggcgccgcgccatagcgccaggtccacatcggcaatctcgccacggtaatcgcccatgttggcgagtttgtcgttcaggtagttgcgcaccaggtagggcagcgcaaggtggatggcaatcaagaccagcaccagagcggcgatggtccctaacggccaactgtagcgacgtttcatagggcagttctccttgcttgtaggagattgactgttctgatgaacgcaacgttcctccgtctggacgcttgggagtacgcggcatacccttggggcctttcccaacgcctcgacaataggaaccgccatgagccgtatctttgcagacaacgcgcactccatcggtaacacgcccctggttcagatcaaccgcatcgcaccgcgtggcgtgacgatcctggccaagatcgaagggcgcaacccgagttattcggtgaagtgccgcattggcgcaagcatggtctgggatgcagaaagcagcggcaagctcaagccgggcatgaccatcgtcgagcccacttcgggcaacaccggtatcggcctggcctttgtcgccgctgcccgtggctacaagttgctgctgaccatgccgtcgtcaatgagccttgagcgccgtaaagtgctcaaggctctgggcgccgagctggtgctgaccgagccggccaagggcatgaagggtgccatcgacaaggccgccgagatcgtcgccagcgacccggccacctactttatgccggcccagttcgacaacccggcaaaccctgcgatccacgagaaaaccaccggcccggaaatctggaacgacaccgatggcgccgtggacgtgctggtggcgggcgtgggaaccggcggcaccatcaccggggtatcacgctatatcaagaacaccgcgggcaagccgattctgtcggtggccgtggagcccatggtttccccggtgatcacccaggccttggcgggtgaagagatcaagcccagcccgcacaagatccaggggatcggcgccggttttgtgccgaaaaacctcgacctgtcgatggtcgaccgggtggagctggcgaccgacgaggagtccaaggccatggcccggcgcttgatgctggaagagggcattctgtgcgggatctcctgtggcgccgccatggcggtggccgtgcgcctggccgagaagccggagatgcagggcaagactattgtggtgatcttgccggactccggtgagcgctacctgtcgagcatgttattcagcgatttgtttaccgaacaggaaaaccaagcctgaatcgactgtaggagcgagctcgctcgcgaaaaacctgagaacgccacgttgtatcagtaaacccgcgttatcgttgacgttcttcgcgagcaagctcgctcctacaggtgttgatacaggtcagtctggtttcctgggccttctgcataatggttcaagtgtttatcatggccggctgctacgtctggtttcccattgacggaaatttgctggccaggcgcttatttccaggagttgctgcatgaccttttctttggccgccaaactgtcggtgttgctgctgttcatcggcagcacgctgtatgtgcacctgcgtggcaaggcccgtttgccgatgttgcgtcagttcgtcaaccattcggcgctgttcgccccgtataacgccctgatgtacctgttttccgcggtgccgtccaagccctacctggaccgcagcaagttcccggaactggatgtgctcaaggacaactgggaagtgatccgcgaagaggccatgcacctgttcgacgagggctacatccgcgccgccgaaaagaacaacgacgccggcttcggttcgttcttcaagaagggctggaagcgtttctacctcaagtggtacgacaaaccgctgccttcggccgaggcgctgtgccccaagaccgtggcgttggtgagcagcatccctaacgtcaagggcgcgatgtttgcgctgttgccgggcggcagtcacctcaacccgcaccgcgacccgtttgccggttccctgcgttatcacctggggctgtctacgccgaactccgacgactgccgtatcttcgtcgacggtcaggtctacgcctggcgcgacggtgaagacgtgatgttcgatgaaacctacgtgcactgggtgaaaaacgaaaccgaacagacccgtgtgatcctgttctgcgacattgagcgcccattgagcaaccgcgtgatgacccgtatcaaccgctgggtcagcaagcaactgggccgcgcaaccgcgccgcagaacctcgatgacgagcgcgtgggcggcatcaaccaggcgtacgcctggagcaagaccttcagcgacaagttcagtggccaggtcaaacagtggaagcgcaagcatcccaaggcctaccgcattgcgcggccggtgctggcggtggtggtgttggtactgctgtggaagtggctgttcggctaaaccgcacaccataaaaaggcgctgtatcgaaagatacagcgccttttttacgcctggaatatgatcaaaactgtgggagctggcttgcctgcgatggcggagtatcagctataaaaaggttgactgacccaccgctttcgcaggcaagccagctcccacatttgatctgcgttgctcttaagaggcgatcaactggcgcagcacgtagtgcagaatcccacccgccttgaagtactccacttcattcaaggtatcaatccggcacagcacctcaaccttctcgctgctgccatcctcgcgagtgaccaccaacgtcaggttcattcgcggctcgatctcggcagcggtcagcccgaggatatcgatcttctccttgccggtgagcttgagtgtcttgcggttctgatccagcttgaactgcaacggcaacacgcccatgcccaccaggttggagcggtggatgcgctcgaagctctcggcgatcaccgccttgacgcccagcaggttggtacccttggccgcccagtcgcggctggagccggtgccgtattcttggccggcgatcaccaccagcggtgtgccggaggcctggtacttcatggccgcatcgtagatcgccattttctcgccagtggggatatacagcgtgttaccgccttcttcgccgccgagcatttcattgcggatacggatattggcaaaggtgccgcgcatcatcacttcatggttaccccggcgtgaaccgtaggagttgaagtcacgcggctccacgccctgttcgcgcaggtagcgcccggccgggctgtcggccttgatattgccggcaggggagatgtggtcggtggttaccgaatcccccagcagggccagcacgttggcgcccttgacgtccgcgatcaccggcagcgggccggcgatgtcgtcgaagaacggcgggtgctggatataggtggaatccggctgccacacgtaggtggctgcctgcggcacttcaatggcttgccactgctcgtcgccggcaaacacttcggcatattccttgtggaacatgctggtgctgacttgggccaccgcctcggcgatttcctggctgctgggccagatgtccttcaggtacaccggattaccctgctggtcattgcccagcggctcgctgctgatgtcgatgcgcacggtgccggccaacgcgtaagcgacgaccaggggcggcgaggccagccagttggttttcaccagagggtgcacgcggccttcgaagttacggttaccggacagcaccgacgcgacggtgaggtcggccttctggatggctttttcgatcggctcgggcagggggccggagttgccgatacaggtggtgcagccgtagcccaccaggtcgaagccaagcttgtccaggtattgggtgaggcccgccgccttgtagtagtcggtgaccactttggagcccggcgccagggagcttttcacccagggcttgcgggtcaggcctttttccacggctttctttgccaccagcccggcggccatcatcacgctggggttggaggtgttggtgcaggaggtaatcgcggcaatcaccactgcgccgtttttcaggcgataggtgttgccttcgtattcataatccgcctcgccgaccaggtccgcattgcccacggcaacgccgcctccgccttcgctttccaggcggccttcttctttgctggtgggcttgaattgcaggtcgagaaaatcgctgaacgcttggcctacattcggcagggcgacacggtcctggggacgtttgggcccggcaaggctggcctcgacagtgcccatgtccagagccagggtgtcggtgaagattggctcctggccggcattgcgccacaggccctgggccttggtataggcttccaccagtttgaccgtctcagccgggcggccggacaggcgcaggtagtccagggtcacttcatccaccgggaaaaaaccacaggtcgcgccgtattccggggccatgttggcgatggtcgcgcggtcggccaggggcaaatcggccaggccgtcgccgtagaactcgacgaacttgcccaccacgcctttcttgcgcagcatttgcgtcacggtcagcaccaggtcggtggcggtgatgccttccttgagcttgccggtgagcttgaaaccgatcacttccgggatcagcatcgacaccggctggccgagcatggccgcttcggcttcgatcccgcccacgccccagccgagtacgccgaggccgttgatcatggtggtgtgggagtcggtgccgaccagggtgtcggggaaggcgtaggtgcggccgtcttcctctttggtccacacggtgcggcccaggtattcgaggttgacctggtggcagatgccggtgcccggcggcaccacgctgaagttgtcgaaggcgctctggccccagcgcaggaaggcgtagcgttcgccgttgcgctgcatttcgatatcgacgttctgttcaaaggcgctggtgctgccgaacttgtcgaccatcaccgagtggtcaatcaccaggtccaccggtgacagcgggttgatgcgctgcgggtcaccgccggccttggccacggcggcgcgcatggcggccaggtcgaccacggcgggtacgccggtaaagtcttgcatcagcacgcgagcggggcggtactggatctcgcggtccgactggcgcgccttgagccaggcggcgatggccttgaggtcggtgccggtgacggtcttggcgtcttcccagcgcagcaggttttccagcagcaccttgagggacatcggcagcttgtccaggtcacccaggctcttggcggcttcgggcaggctgaagtagtggtaggttttgctgtctatgtgcagtgtcttaagggttctcaggctatcaagggatgacattacatgactccttatggtccgcacggctacggacctgacgggacgaacagagctatcacgttagcgctgttttcattagcaggctaataactggactctatcgctgagtccaaggttccgaactcggctatcatgcgcgcgttttcatgacaggtattgcgatagcgcaaggccagttgattcaccaggagattcaatgaacaccctttttatgcactgccgcccgggttttgaaggcgaagtctgttccgagatcgcggagcacgccgcgcgcctgaacgtgtccggctacgccaaggccaagaccggcagcgcctgcgccgaatttgtctgcaccgaagaagatggcgcccagcgcctgatgcacggccaacgctttgccgagctgatcttcccccggcagtgggcgcgcggggtgtttatcgacctgccggaaaccgaccgcatcagcgtgatcctcgcccacctgcgcgaattccccgtgtgcggcagcctgtggctggagatggtcgacaccaacgacggcaaggagctgtcgaacttctgcaagaaattcgaagtgcacctgcgcaaagccctgcttaacgccggcaagctggtggacgacccgagcaagccgcgcctgctgctgaccttcaagagcggccgcgaagtgttcatgggcctggccgaatcgaacaactcggcgatgtggcccatgggcatcccgcgcctcaagttcccgcgtgacgcgcccagccgctcgaccctcaagctggaagaggcctggcaccacttcatcccccgcgaccagtgggacgaacgcctgcacggcgacatgactggtgtcgacctcggcgcagcgccaggcggctggacctggcaactggtcaaccgtggcatgctggtgaccgccatcgacaacggccccatggccgaaagcctgatggacaccggcctggtgcaacacctgatggccgacggcttcaccttcgtgcccaagcagccggtagactggatggtctgcgacatcgtcgaaaaacccgcgcgcaacgcggcactcttggaaacttggattggcgaagggcattgccgcgaggcggtggtgaacctgaagttgccgatgaagcagcgttacgccgaagtgaagcgtttgctggagcgcatcgaagagggcttcaaggcgcgcggcattcgtgtggagattggctgcaagcagctctaccacgaccgcgaagaggtcacctgccacttgcgtcgtctgatagacataaagaaatctaaaggccgctgatattaaatgtgggagctggcttgcctgcgaaagcggtataacagtcgaaatttatgttgaatgtgcccccgtcatcgcgggcaagcccgctcccacattgctgagcggtgccagttttaggagtgaagtatgagtcttgaacctgttgacggtaccctcgacgccaccggcctcaactgcccggaacccgtgatgatgctgcaccagcacatccgcgacctgccggcgggcggtctgctcaaggtgatcgcgaccgacccgtcgacccgtcgcgatatccccaagttctgcgtgtttctcgaccacgaactggtggatcagcaggaagatgctggcacctacctgtactggatccgcaagaaagccgattaagcctgcgccttttcggcccggatgcgtcggcgtgcactgcgcgccaggcgcaccaccaacatccccgctgcacagctcaagcccacgatcagcccttgccataaaccgctcgggccgctgggctcgccgagccagtttgtcaggcccagggcgtaacctaccggcaggcccacgccccagtaggcgaacaaggtcagcaccatggtcacccgggtgtcctggtagccgcgcaatgcgccggcggcggtgacctggatcgagtcggagaactggaacaacgccgagaacacgatcagcatcgacgccaggtggatcaccaccgggtcgggggtgtagatcgctgcaatctgctcgcgaaacagcagcatcaagctgcaggaaaaacacgcgtacgccagggcggtgcccatgccgacgccggcggcgaagcgagcttcccggggttcgccgcgccccaacgcctggccgacccgcacggtgacggccatgctcagggaataggggatcatgaacaccagggagctgacgttcagggctatctggtgaccggagaccaccgtggcgcccaggctgccaagcaacagggcaatcaccgcgaaaatgctcgactcggcgaagatcgccacaccaatcggtaggccgatgcccaggatgcgcttgatcaccgtccattgcggccagtcgaagcgcttgaacaattcgctgctttgataggccgcgccccagcgcgtccagatggccaggccgatcatcatcacccacatcgcaatggcggtagcccagccacagcccacgccgcccatggccggtacgccaaagtggccgtagatgaagatgtagttcagcggaatattcagcgccaacccgcacaagcccatgaccatgctcggccgtgtgcggcccaggccgtcactgaaacagcgaaacacgtagtacaacgcaaccgccggcataccggcggcgatgccgtgcaggtagcccatggacggctcgatcaggtcgggctcgaccttcatggcatgcaggatcggctcggcgcacagcaacagcagcgcgccgcagagaccgaccaccacggccaaccacaacgattggcgcaccagaggcccgatctcggtgagtttgcccgcgccataacgctcggcaactttcggtgtggtggccagcagagtaccggtcatcaacaggtacaccgggatccagatcgaattacccaggcccaccgccgccaggtcctgcgggctcacgcgcccagccatcaccgcatcgacgaagctcatcgcggtggttgccagttggccaatcatgatcggcaaggccagcgtcagcaggccgcgcacttcccggctgatgcgggcggggcgggagagggtagcggtggcagtgttcacgtacaggtgtccaataaaaaggcagtcgcaaggacggcggattctacgcgttgacgcagtggtcaggaaaaaacctgtgttagggatttgtaagcaatgcgcccaggccagctcctacacaggatcttctgtacactgccaatccgccaaaggagcctgccatgctgattgttgccgacgaaaatatcccgctgctcgatgcattcttcgaagggtttggcgagattcgccgtgtgcccggccgttccatcgaccgcgccacggtcgagcaggccgatgtactgctggtgcgctcggtgaccaacgtcaaccgcgccctgctcgagggcagtaaggtgcgttttgtcggcacttgcaccatcggcaccgaccacctggacctcgactacttcaagcaagcaggtatccagtggtccagcgcgcccggctgcaatgcgcgtggggtggtggactacgtgctcggcagcttgcagaccctggctgaaatcgaaggcgccgacctcaagcagcgcacctacggtatcgtcggtgccggtgaagtcggcgggcggttggtcaaggtgctcaagggcctgggctggaatgtgttggtgtgcgacccaccgcgccaggtcaccgaagacggtgattacgtcagcctgcagcagatcatcgagcactgtgacgtgatcagcttgcatacgccgctgatcaagtccggcaatggttcgacctggcacctgtttgatcgccagcgcctggaacagctcaagccgggcacctggctgatcaatgccagccggggcgcggtggtggataacgccgccctgcgcgaggtgttgctggcgcgcgaagacctgcaagcggtgctggacgtgtgggaaggcgagcccgaggtggatgtcgagctggcagacctgtgcgtgctggccacgccccatatcgccggctacagcctcgatggcaaacagcgcggtaccgcgcagatttaccaggcgctgtgtgcgcacctgggccaggagccgagtatccagctgagtgatttgctgccggccccctggctggccgagatgcaccttaacgctacgactgacccggcctgggcgctggcgaccttgtgccgcagtgtgtacgacccacgccgtgacgatgcggatttccgccgcagcctggtaggtaccgtgcaggagcagcgccaggcctttgacctgctgcgcaagcattacccggaacgtcgcgagatcgatggcttgaaggtgcgcatcatgggggagtcggtggtgctgtcgcagatcgtggctgctctgggcgccgaacacctataactgtaggagcgagcttgctcgcgaaaaacgtcaacgataacgcagcgtttctgatttaacgcggcgccctcaggtttttcgcgagcaagcccgctcctacagggggcataaaaaacccggccaccggggccgggtttgaaagagcttgggcgcttcagccttgctgggcaggcttgaccagtcgctgttccagttcgctgcaggcttgctggatcatttcttcggtaatctgcacttcctggcctttggcatcgatatacgagcaaggcagctgttgcggctggcggatcacttcaatcttggcgtcgctgctattttgcaaggtcatggcctgtctcctcatcaggttgtgtacctactttaattcccccgcatgaacgcgccgttacaactccttacacgctcatcggtttgaacacccagtccaccagaaaccggtacatatttccagatgaggcttagaccgatagcctctagcggcctgcatcggtgggcataattaacctgactcattgttattcgcgcaagttcccccaatgttggagggtacagattcctcattggtgatacctcccatgttctccatccgtcaacgccgtgcgattcgcctggccagccgctttatcgcgccctaccgctggcaggcgcttggcgcactgctggcgctgatcgtcaccgctggcatcaccttgtccatggggcagggcatacgcctgctggtggaccagggcttcatgactcagtcgccgcacttgctcaaccagtccatcggcctgttcatgctgctggtgctcggcctggccgtgggcaccttcacgcggttttacctggtgtcgtggattggcgagcgggtggtggccgatattcgccggcaagtgttcaaccacctgatctacctgcacccaggcttctacgagaacaaccgcagctccgaaatccagtcgcggctgaccaccgacaccaccttgctgcaatcggtgatcggctcatcgctgtcgctgtttttgcgcaatgcccttatggtcatcggcggcatcgtgttgctgtttatcacgaaccccaaactcaccagcatcgtggtggtggcgttgccgctggtgctggcgccgatcctgattttcggacgtcgggtgcgcagcctgtcgcgtttgagccaggaccgtatcgcggacgttggcagctatgtcgccgagaccttgggccagatcaagaccgtgcaggcctataaccatcaggtgcaggacgaacagcgctttgccgtcaccgtcgaggacgccttcatcaccgcacgtaagcgcatcttgcagcgctcctggctgattaccctggtgatcatgctggtgctcggtgcggtgggcgtgatgctgtgggtgggcggcatggacgtgatcagcgggcgtatttccggcggtgagctggcggcgttcgtgttctacagcctgattgtcggcagcgccgttggcaccctgagcgaagtgctcggcgagttgcagcgtgccgctggggcggcggagcggatcggtgagctgttgcagtcaggcagcgacatccaggcgccggccactggcggtgtacgtttgccggaacgggtcagcggccgcatggaactgcaggacctacgcttttcctatccttcgcgaccggacagctatgccatcgacggcttgaacctgaccatcaacccgggcgaaaccctggccttggtagggccgtccggtgcgggcaagtcgacgattttcgatctgctgctgcgcttctacgacccccagcaaggccgaatcctgctcgaaggccagccgctgaccgagctagaccccctggacctgcggcgccatttcgccctggtgtcccagagcccggcgttgttcttcggcagcgtcgaggacaacatccgctacggcaacccgtccgccaccaccgcccaggtggaagccgccgcgcgtattgcccacgcccacgacttcatcctgcaaatgcccgacggctaccaaacccacctcggcgaaagtggccagggcctctctggcggccagcgccaacgcctggccatcgcccgcgccttgctggtcgacgcgccgatcctgctactggacgaagccaccagcgccctcgacgctcagagcgaacacctgatccaacaagccctgccgcagctcatgcaggggcgcaccacgctggtcatcgcgcatcgtttggccacggtgaagaatgccgaccgcattgcggtaatggaccagggcaagctggtggcggtgggcacgcatcagcagttgattgcgagcaatccgttgtatgcgcggttggcggcgttgcagttcaacgatggagatgaacaggtgaaataaaaaatgcccgcatctctcgatgcgggcaatggcgcctctgtaggagcgagcttgctcgcgaaaaactcacaggcgccgcgtttatccaggaagcacgcgttagcgttgacgttcttcgcgagcaagctcgctcctactggtcgtcgaagtaccgctcatgccaatccaccaacggttgcggtgagttgagcttctgcccgtagatcaccgaataagacagcacgttctgcacatactggcgggtttcgtcgaaggggatgctttccacccacacgtcgaaactcaggtggtctgcgccgcgcagccattggcgcacgcggccggggccggcgttgtaggcagcggaggcgagcacgcggttgccgttgaactggctgtgcacctggctcaggtaggcagcgccgagctggatgtttttatccgggtccagcacttgggccggggaggccagggggatactgaatttgcgtgcggtttccttggcggtgccgggcatcagttgcatcaggccgctggcgccaacgccggaacgggcgtcatccataaacgcgctttcctggcgggtgatggcaaagatccaactggagtgcaggccgcgtaccttggcttcgcgcaccagggtgtcgcggtgggccatcgggaagcggatgtccaggtcgtcccagtactgcgcctggctgatggtgcggatcgccgggaagtaccacttcatgtcgtaggccagtttggcctgggccaccatctcgtcacggttgaaatgacggctgacgtggtaccactcacggcgaccgtcgacgatctggccgcgggcgtagaactccagggccctgcgcacgcctggggtgttgcggaccttgttgaccagggcctggctcatcactagcggcttgttgttcaactgataaggcgatttggagcggtcagcggcgaggaaaccgtagaagtcccgctccttggcgacgtttttgtacagcaccaaagcctgcgggtttttcggctcggccagctccaggctgcgcgcctgccagtagcgccagcggttggtggtggccaggtcttgtgggagcttacgggtcaactggtaggcgtcttcccagcgcgccaggcgcaacaacaggcgcaggcgccattcggagaccgtattgtcgcgcagttcggggtcgtacttggtcatgacctccagcgcgcgcgggtcgaagcgcttggccagggtcaagccgatctcgcgggcaatcgacactttttcgtcacgggagaagtgcatgctgctggcgtaaccgtcgagcagcgacatggctttgtccggatcctggcgcgccaggcgacgcaggcccaggcccacggcgtcagccatggcctcggtggccggctggaagcgtgacgggtcgctgagcatgtcgggcttttgcgcaacatccaccatcaagcggccttgggcgccgagggtgggcagggttttcaccaggctattggccagcgcgtagttacgcgcttcggcggcgagcttggcgcgctcccagatcttctgctcggtgagttggccggcagcggcccattggccaaacgtgacgtcacaggcggcgggctgggatttgccggtcatccacagcttttcggcagtcttgtagccttcggctttcaggttgtggctgagctggtactggccatgcaggcagtccagctcgacgaaattgagcttggtgtcgtagtacttttcaaaggtctgccaatcgccacgttcggccagccagcgcagccaacgcagtttcatccagttggcctggggcaggtcgccgtgtttggcgaggaattgttcgatttcctcgttgctcgcggttttcaggcgcgcggtcagctcgtcataggccaggtagggcgtgagcgggtaatcggccagggcttggctgtattgcatgtaggggccgctgtcgcccttggccagggcgcgtttggcttgatcgtaatactggcgttgagtggtgaggtccaccgcctgggcggattgaacggcagtggcggaaagaagcagacaagataaaaagttgaaaaggcgactgcgcatgagacgtccgtgcagagaaatcacgactagcaccggcactgccgacactgattgcccctagcttagccttttgccagcggcccgcgaaagctttgccggctggttcgttcaagttcgccggaaatgtcctacagaacgtgtcaatagagaaaatgccgaccgcatcccaccctcacatcaggtagaatgcgcgcccagtttttggagaagcgtatgaccctgctcaaattcagcgatgtgtcccttgctttcggcgccatgccgttgttggacaaggtgtcctggcagatcgcccgtggtgagcgggtgtgcatcatcggccgcaacggcaccggcaagtccagcatgatgaagctggtaaaaggcgaccagaagcccgatgacggctctgtgtggcgtgccccgggcctcaagatcggcgaattgccgcaagaattgccggtggccgacggacggacagtgttcgacgtggttgccgaaggcctggatggcgttggcgagttgctcgcgcaataccatcacctggcgcagaactgcgtcaccgaggaagacctcgacaagctgatgcacgtccagcaagacctcgaagcccgtgacggctggcgcttgcagcaactggtggacagcaccctgagccgcctgcaactgccggccgacaagaccctcgccgaattgtccggcggctggcgtcgtcgcgtgctgctggcccaggccctggtgtccgagccggacctgctgctgctcgacgaaccgaccaaccacctggacattggcgccatcgcctggcttgaagaagccatcaaggacttccaaggcgccgtgctgtttatcacgcacgaccgtgctttcctgcagagcctggccacgcgcatcctcgaactggaccgtggcggcctgatcgactggaacggcgactacgctagcttcctggtgcacaaggaagccgccctggcggccgaagaaaccgccaacgcgctgttcgacaagaagctggcccaggaagaagtctggatccgccagggcatcaaggcccgtcgcacccgtaacgaaggccgcgtacgtgccttgaaagccttgcgcgtcgagcgcagtgagcgccgcgagcgcaccggcaaggccaatatccagctcgatactgccgacaagtcgggcaagcaagtgatggtgctggagaacgtcagcttccatcacccggacggcccgttcctgatcaaggacttctccatggtcctgcagcgcggcgaccgtatcggcctgctgggcgccaacggtaccggcaagactacgttgctcaagctgatgctcagcggcctgcaaccgaccagcggcaaggtcgaagagggcactcgcatcgacgtggcctactttgaccagttgcgccaccagttggacctggaaaagaccgtgatcgacaacgtcgccgaaggccgcgactttatcgacatcgacggccagagccgccacgtactcagctacctgggcgacttcctgttcagcccgcagcgtgcacgtacgccggtcaaggcgctgtcgggtggtgagcgcgcgcgcctgctgctggccaagctgttcagcaagccggccaacttgctggtactcgacgaaccgaccaacgacctcgacgtggaaaccctggaactgctggaagaggtcttgctgacctttaacggcactgtgctgatggtcagccacgaccgggaattcctcgacaacgtggtcaccagcaccctggtcttcgaaggtgaaggcaaggtgcgtgaatacgtgggcggttatcaggactggctgcgtcagggcggctcgccgcgcctgctgggcgtaaccgagagcaagtcgggcaaagcagacttgaacacggcggtggtggctccggtcgctgccgaagcgcctgcaccggcggctgacgctgcgccggccaagaaaaagctgagctataagttgcagcgcgagctggaagccttgccgggtgatatcgacgccaaggaacagcagattgctgcggtcgaagcggaaatggctgacgctggtttctacctgcgccctgcggcagagaccgccaaggtcatcgcctctttggagacgttgaaccaggagctggaagcgttggttgagcgttgggccgagttggatgcctgagtgatcttgcagcactgaaaagcctggcgttcattcctatgagcgcgaggctttttaatatgaaatgcgatccaactgtgggagctggcttgcctgcgatagcggtgtatcagccacctgatgcatcaactgacaggctgctatcgcaggcaagccagctcccacattagaccttcatcggtcttacgaactctttaccagtttgacggccagtacatcgcacggcgcgccgtgcaatacatcattggcggtcgagcccagcagcaaggccaagccgtggcgcccatggctacccactacgatcaggtcacaaccctgttccttggccaagtggtgaatttcctggcgcggttggccgtatgtcaggtggcagtcttcctttttcaggtgcgggtatttgagaatcaaacggtccaggcgctccttggcctggtcgaattgttgctgctgcagctgggaaaggtccatcggcacgtcaccaccaaaggccatcgccatgggctcgacgatgtgcaccagcgacagtttggcgccattggcaatcgcggattcctgtgcgcgcttgatcactggatcgcactcttcggtcaggtcgacagcgaccagaatatgtttgtagggcatgaggcgttcctccaggggactgcaataagttcagtatggctgctttcaagcggatggggttgccgcagatcaaatccgctcatctagaaattcgggagtacacatatgacggtctggatagtggtgtcaatccttgcggtggttttgagccccctggtatggctgcgtccttcgcgccagcagagcgggcgcatggccctgcgcatggaggcacgccgcatcggcttggccatgcagttggcgcctcaggagtggccgcactggctcaaacaggagccgccgagcccttgcgcgcagtactgccgaccacggcgtggcagcatgcccgcgacctggagttactggcagatggagccggggctgtgggtcaatcagtggcgtgagccttgtgtggatgagaagttgttgccgcattttgcaacgctgccggcgaacgtctacaaggtcgaggccgacaaacagatgattgctttgtattggggcgagaagggcgacgcaagcgtactcaaagacatcgatacgctgctcaaggccctggcctgacccaaaccctgtaggagcgagcttgctcgcgaaaatcgccaacgataacgcggataatcaggctatacgcggcgctctccaggttttcgcgagcaagctcgctcctacacaaaagccgggcaataaaaagcccgacatcatcatcgggctggaggtggccaggcaggccggtaaatctgtaggttgccgctagcctagccgggtattcctttctgtacagccttttcccacatcttttctattattgatcctgtgaatatttgaatattgacgggtggcccgcctgtgggccgggttctgaaatgactggaaagtcgcgtttttactagcctttggagcgattgacaattgctcggaattggatgaaggtggcgtacccaaatcaaacgggcgtatgaattgagcgtttgcctgtcagacgactcatacaaaacccgactatcgcactggcgggtgtgcctggcggattggcgtgagcattgattcaactgtcaatgtcaaaccagagaccagcgtccagtgtgtactgttcagcttccatatcgtggagatcagttgatgatttacgaaggtaaagccatcacggttaaggctcttgaaagtggcatcgtcgaactcaagttcgacctcaagggtgagtccgtcaacaagttcaaccgtctaaccctgaacgaactgcgtcaggccgtagacaccatcaaagcagatgcttcggtcaagggcgtgatcgtctccagcggcaaggacgtgtttatcgtcggcgctgacatcaccgaattcgtcgacaacttcaagctgcccgatgccgagctggtggctggcaacctcgaagccaacaagatcttcagcgatttcgaagacctcaacgtgccgaccgttgctgccatcaatggcatcgcgttgggcggcggcctggaaatgtgcctggcggcagatttccgcgtcatgtccgcgacggccaagatcggcctgccggaagtcaagctgggcatctacccaggctttggcggtaccgtgcgcctgccgcgcctgatcggtgctgacaacgcgatcgaatggatcgccgccggcaaggaaaacaaggctgaagacgcactgaaagtcggtgccgtcgacgctgtagtagctccggacaagctggccgaagccgcgctgaacctgatcaagggcgccatcagcggcgaatttgactacaaagccaagcgtcaaccgaagctggaaaaactcaagctcaacgccatcgaacagatgatgtcgttcgaaaccgccaaaggtttcgtggcaggccaggccggcccgaactacccggcgccggttgaagcgatcaagaccatccagaaggccgcgaacttcggtcgcgacaaagccctggaagtggaagcggcaggcttcgtcaaactggcgaaaacctcggcggcccagagcctgatcggcctgttcctgaacgatcaggaactgaagaaaaaggccaaggcctacgacgaaattgccaaggacgtgaaacaggctgccgtactcggcgccggtatcatgggtggcggtatcgcctatcagtcggcgtccaaaggcacgccgatcctgatgaaagacatcaacgaacacgggatcgagcagggcctggccgaagtcgccaagctgctggtgggccgcgttgataaaggccgcatgaccgctgcaaaaatggctgaagtgcttaacggcattcgtcctacgctgtcctacggcgatttcggccacgtcgacctggtggtcgaagcggttgtcgaaaacccgaaggtcaagcaagccgtgctggctgaagtggaagcccaggtcaaagatgacaccatcctggcctccaacacttcgaccatttccatctcgctgctggccaaggccctcaagcgtccggaaaacttcgtcggcatgcacttcttcaacccggtgcacatgatgccgctggtagaagtgatccgtggcgagaagtccagcgagctggccgtggccaccaccgttgcctacgccaagaaaatgggcaagaacccgatcgtggtcaatgactgcccgggcttcttggtcaaccgcgtgctgttcccgtacttcggcggtttcgccaagttggtcagcgccggtgtggattttgtgcgtatcgacaaggtcatggaaaaattcggctggccaatgggcccggcgtacctgatggacgtggtcggcatcgacaccggccaccacggtcgcgacgtcatggctgaaggcttcccggaccgcatgaaagacgaccgtcgttcggctgtcgacgcactctacgaagccaagcgcctgggccagaagaacggcaagggtttctacgcctacgagaccgacaagaagggcaagcagaagaaagtggccgacccatcggtgcacgaagtactcgctccggtcatctacgaacagcgtgaggtgtctgacgaggacatcatcaactggatgatgattgccctgtgcctggaaaccgtgcgttgcctggaagacggcatcgttgaaaccgccgccgaagccgatatgggcctggtgtacggtattggtttccctccattccgtggtggtgcgctgcgttacatcgactccatcggtgtggcccagttcgttgccctggctgatcagtacgctgatctgggcccgctgtaccacccgaccgcgaagctgcgtgaaatggccaagaatggccagagcttcttcggttaagtgcccagacgactagagcgagaatatttatgagcttgaatccaagagacgtcgtgatcgtcgacttcggtcgtacgccgatgggccgctccaagggcggcatgcaccgcaacacccgcgccgaagacatgtcggcgcatctgatcagcaaagtgctggagcgcaacaccaaggtcgacccgaacgaggtcgaggacgtgatctggggctgcgtcaaccagaccctggagcagggctggaacatcgcgcgcatggcgtcgttgatgacccagatcccgcacaccgcggccggccagaccgtcagccgcctgtgtggctcctcgatgagcgcgctgcacaccgctgcgcaagcgatcatgactggcaacggcgatgtgttcgtggtcggcggcgtggagcacatgggccacgtcagcatgatgcacggcgtcgatcctaacccgcacatgtccctctacgcggcgaaagcctcgggcatgatgggcctgaccgcggaaatgctcggcaagatgcacggcatcacccgtgaagcccaggacgccttcggcctgcgttcccaccagctcgctcacaaggcgactgtggaaggcaagttcaaggatgaaatcatcccgatgaacggctacgacgaaaacggttttctgaaactgttcgactacgacgaaaccattcgtccggacaccaccctggaaagcctggcggccctcaagccagccttcaatccaaagggcggcaccgtgacagccggtacttcctcgcagatcactgacggtgcttcgtgcatgatcgtgatgtcggcgcagcgtgcccaggacctgggtatccagccgttggccgtgattcgttcgatggcggtggcgggtgtggatccggcgatcatgggctatggtccagtaccggccacacaaaaagccttgaagcgcgcaggcctttccatctccgatatcgacttcttcgagctcaacgaagctttcgccgcacaggccctgccagtgctgaaagatttgaaagtactcgacaagatgaacgagaaggttaacctgcacggcggtgcgattgccctgggccacccattcggttgctccggtgcgcgtatctccggcactttgcttaatgtgatgaagcaaaatggcggcaacctcggggttgcaaccatgtgcattggtctcggccaaggcatctccaccgtcttcgaacgcgtctaaacgttcggttgacggaagccggggcccagtgccccggtttttgttttttggaacttttaaatattttttttcaacaaattttgtacgagggccagagcatgaaagtcgaaccagggctctaccagcattacaaggggccgcagtaccgtgttttcagtgtggcgcgccactctgaaaccgaagaagaagtggtgttttaccaagcgctgtatggcgaatacggtttttgggtgcgccctttgagcatgttcctggagaccgtcgaagttgacggcgagcaggtcccgcgctttgctttggtcacggccgaacccagtctttttacagggcaataacggcaggtcgcgcagaatgctgcgcttgacctcatccggttgccactatatatagcgttgccgcgtcaggcgccaactgcctttcacttctcgaattcaggaattttccgatccatgggcaaatcgctggtcattgtggaatccccggctaaggccaagaccatcaacaagtacttgggcaacgagtacgtggtgaagtcgagtatcggccatatccgagacctgcccaccagcggttcggctagcgccagcaaggagcctgccgccaagcgcggaaaggccgccgcgggcgaaggtccggtactcacgcctaaagaaaaagcgcgcaagcaactggtttcgcgcatgggtgtggacccggaccatggctggaaggccaagtacgaaatccttccgggcaaggaaaaggtcatcgaagagctgcgccggctcgccaaagatgctgacaccatctatctcgcgacggacttggaccgcgaaggggaagccattgcctggcacctgcgcgaagccatcggcggtgatgacagccgctacaagcgcgtggtgttcaacgaaatcaccaagaaagccatccaggaagcgttctccaagccgggcgagctggatatcgaccgtgtcaacgcccagcaggcccgtcgcttcctcgaccgcgtcgtcggctacatggtctcgccattgctgtgggcgaagatcgcccgtggcctgtccgccggccgtgtgcaatcggtagcggtcaagctggtggtggaacgtgagcgcgagatccgtgcgttcatccctgaagagtactgggaagtccacgccgacctcggcactgccaagggcgccaatgtgcgctttgaagtggcccgtgagaaaggcgaggccttcaaaccgctgaacgaagcccaggccatggccgcgctggagaagctcaaagcctccagctacagcatcgtcaagcgtgaggacaaaccgaccagcagcaagccgtcggcgccgttcatcacctccaccctgcaacaagccgcgagcaaccgcctgggcttcggggtgaagaagaccatgatgatggcccagcgcctgtatgaggctggctatatcacgtatatgcgtacggactccaccaacctgtcgcaagacgcggtggcgatggcgcgtacctatattgaaagcgaattcggcaagacctacctgccggagaagccgaacgtctacagcagcaaggaaggcgcacaagaggctcacgaagcgattcgtccttctgacgccaacaccacgcctgccaagctgagcggcatggagcgcgacgctgagcgcctctacgagctgatctggcgccaattcctggcgtgccagatgctgccggcgcaatacctgtctactaccgtcagcgtgggcgcgggcgatttcgagctgcgtgccaagggccgtatcctcaagttcgacggctatacccgcgtgatgccgcagattgccaagcctggcgatgatgacgtgctgccggacatggcccagggcgacacgttgaagctgatcaagctcgacccgtcccagcacttcaccaagccgccggcgcgttattccgaagccagcctggtcaaagagatggagaagcgcggtataggtcgtccatcgacctacgcggcgatcatctccaccatccaggaccgtggctacgttgcgttgcacaaccgtcgtttctattcggaaaagatgggtgacatcgtgaccgagcgtctgtcggagagcttctccaacctgatggactacggtttcaccgcgggcatggaagagaacctcgatgacgtggcccagggcgaacgcgactggaaaaacgtgctcgacgagttctatggcgacttcaagaaaaagctcgaagtggccgagaaccctgagaacgggatgcgcgccaaccagccggtgatgacggatatcccgtgcaccacctgcggtcggccgatgcagattcgtaccgcctccaccggcgtgttcctcggttgttcaggctacagcctgccgccgaaagagcgctgcaaggcgaccgtcaacctggtgccgggcgatgaaattgcggctgatgatgagggtgagtccgagtcgctggtgttgcgcggcaagcaccgctgcccgatctgcagcacggcgatggacgcttacctgctggacgagaagcacaagctgcacatctgcggtaacaaccccgattgcaacggctacgagatcgaagagggcacctaccgcatcaagggctatgaaggcccgagcctggaatgcgacaagtgcggcagtgagatgcagctcaagaccggccgtttcggcaagttcttcggttgcaccaacccgacgtgcaaaaacacccgcaaactgctgaaaagcggggatgcggcgccgccgaagatggacccggtgaagatgcctgagctcaagtgcgagaaggtcaacgacacctacatcctgcgtgacggcgcttcggggctgttcctggctgcgagccagttcccgaaaaaccgcgagacccgtgcgccgctggtgatggagatcgtgccgcacaaggacgagatcgatccgaagtaccacttcctgtgtgaagcgccgaagaaggacccggatggtcgcccagccgtgatccgctacagccgcaagaccaaggagcagtacgtgcagaccgaagtggacggcaagccgactggctggaaagcgttctacgacggcggcaagtggaaggtcgaggacaagcgccaaggcgcttgatccgctagtctgttaacgccaaaagccgtctgtatagacggcttttgcttactgtaggagcgagcttgctcgcgaagatcgttaacgaaaacgccggaaacctggcaccctacggtgcctggaggtttttcgcgagcaagctcgctcctacacagccagcatcacgcctattcgttgtggagattgccgtcatggccaacgaactctatacccgtaccaatcagaaaatttacttcgcgggtttatccctggaggcccttggccgtgccgaggaagggaaagagatgaatgccatcgcgctggtacaggcggggcgcgaagcggcgttgttccacctgtacggtgccttgctggggctgtgccatgaaatcgccgggttctatcgcttgccccaagcgggcgcgcctcgggcggaaatgatcatgaatcgtgaagtgttggattccatggcgatccccgagttggccgagttggtggaaatggcccaaagccctgacagttgggtggcgcggctgctcaaggcccatgcggatatgtttcagccaccgcgtattccccatgtgcccaagggggatgttacccagccgctgatcgtcgccgtggcattggagcaggatgagcccaagcctttgagccgtgaggaattggaaggctggcgccaggaactgaagaagatggcgctgcgttttcgtgaagggttgaacgagtgctgaagggtttgcactaagcaaatgtgggggctggcttcggagcgacgctgaacctgtggcgagggagcttgctcccgtgacgaccggacagccgacgcttatgtacctgacgctctaggatccatatgtgggggcttgtctgaaagccgatacctatcgacctgacgccccgcgatcaaactgtgggagctggcttgcctgcgatgacggcctgccagccgacacctatcgacctgatgccccgcgttcaacctgtgggagcgggctcgcgaaggcggtctggcaggcgaccctgttataccgagtacatatccattcctgcggttacggccacttagggttccgcctgacggcgggtcactttcgaaaagcgcgaaagtaaccaaagcgctcttgcccctccactcggcccctcgcctaggctcggtgtgcccgaacacaggcttgaatccgtgggccgccgccacgcgccatccatggcgcggggcggctaacccggcgtcctgccgggttacccacgaattcaagcctgcgttcggccagcgtggtttaacggggcgcctgagatcaagatcaaaagcagatcaagagcagatcaagagctgctcgcttcgcatcgtggttaccgttggctgctacggcttacaaagttgtatagatacttatgctgcgatagcggtgggtccgtttgctgattatttgctgatactccgccatcccaggcaagccagctcccacattgattagcgtgttgcccagggcaccattcatcaagccgtcaacaaacctgtccatatcctctgcgaggctgggtggatgactgatataatcccaggcctttcgtggagaacagacttttatgccaacgtcctttctggaaattgttgaactgcctgacggccgaatcgaactgcgccgggcggaggacgagggttctctggttattctggatttctccgaagacgccaaagtcttcctgcaaggtcagcacgtcgaagtggctaaagccatgttgagcgtgggcgtacagatggcaggtcgccttgccgaaggcgagccggagaaagaagaagggccgcgcgttcttcactgagtccttggtgaaggctgcgtttgtggcgcgcccgtcattaccccaatcgaatatttaaactctgcgcatcacccatgcgcgcagcgctgatcagttgctgcttggcgcttgcattcaaagggttcaaccagctcaccaccgtatggctacggcctagacgcaaggcttcgcaagtaagctgctgggcgctttgcgcgccgcgtggttgcagcaacaggatgcgctcgcggttgagcccggcgtcccgcagccaggcctgggtgaggctggcgggcggggcgatcagtgtcagccagcgggcgtcctgatcttcgcttaattcgcgcaggataggtgccagcaggttcaggcagctctcagccgcaccgcgcaacgacaattcactgaacgcctcaggttcgccgccccagggggcttcgaccgtttccttgaggattggcgcaaggggttgggccatgaaggcctcgaacagcgacagttgtgcgtgttgtggggtgtgtacgagctgcatgatgcctcctttagcggcgaatgacgccgacactcaagccttcgatcaccaggtcctggtctttcaggttgacttcgatcggggcaaactcagggttttcggccaggagccagaccttgctgccttcacgtttgaagcgtttgaccgtgacctcgtcgccgatacgggccacgacgatctggccattgcgagcttcgcgggtggtatggaccgccagcaggtcaccgtcaaagatgcccacgtccttcatgctcatgccgtgaacgcgcaacaggtagtcggcgcggggatggaagaaggtcgggttgatgttgcaggattcctcgacgtgctgctgcgccaggatcggcgcacctgcggcgacgcggccgatgatcggcaatgtcgactcgtcggccttggcttcgaagccagggatacgaataccccgcgaagcacctggggtcatctcgatcgcacctttgcgagcgagggccttgaggtgttcctcggcggcgttcggggatttgaaccccagctccagggcaatctccgcacgggtaggcgggtaaccattgtcatcaaggcagcgcttgataaaagccagaatctcagcttggcgtggcgtcagttttagcatgttgatcgctctgtctttttatacagtgactgggattatatacagtgaactgcgcttggcaatcatcctttttagcggctccgctggacggtcatccgtcagccgtcctacacagcagatgcggcgctgcctacagagctgcgaggatgtgattaaatagcgatgaaacagatgaccgaccagccgcaaagcggacctgcaggcttgacaagacacactctgaaacgtatgtttcaaacaagtgtttgtcaggcggagtagccatggcccagtcggaaaccgttgaacgcattctcgatgctgccgagcaattgttcgcggaaaaaggatttgctgaaacttcattgcggctgatcaccagcaaggctggggtcaacctggctgctgtgaactatcatttcggctcgaaaaaggccctgatccaggcggtattctcacgctttctgggcccgttctgcgcaagcctcgaccgtgagctggaacgccgccaggccaaggccgatcacaagcccagcctggaagagctgctggaaatcctggtggagcaagcgttggttgtgcagcctcgcagtggcaacgacctgtcgatcttcatgcgcctgttgggcctggcgttcagccagagccagggccacttgcgccgttacctggaagacatgtacggcaaggtgttccgccgctatatgctgctggtcaacgaagcggccccgcgtattccgcctatcgaactgttctggcgcgtgcatttcatgctcggcgccgcagccttcagcatgtctggtatcaaagcgttgcgggcaattgccgagaccgatttcggcgtaaacacttccatcgagcaagtcatgcgcttgatggtgccgttcctcgccgctggcatgcgcgccgaaaccggcgtcagcgatccggccatggccgccgcccagttacgcccacgcagcaaaaccgtaccggtcgccgccaaggtttgatcgctgcgggtgggcgcggccgcttgcatccgctaagctagccgccatgccgatttcagctatttattcgcaacctgtcgtccttgccgtgcctggcaaggacgacgggttgtgtgcgttatttaaggaaggtttatgactgctgccctgcaaggttctttgatggtcgacgtcgccggtacctggctcacggccgaggatcgtcacctgttgcgccaaccggaagtgggcggcctgatcatttttgcgcgcaatatcgagcacccgcgccaggttcgcgagttgagcgcagccattcgcgcagtgcgtccggatttgctgctggccgtggaccaggagggcggccgcgtgcagcgtctgcgccaaggcttcgtgcgcctgccggccatgcgtgcgctggcggataaccccaacgccgaatacctggccgaacaatgcggttggatcatggccaccgaagtgcttgcggtgggcctggacctgagttttgccccagtgctggacctcgactaccaacgcagcgccgtggtcggcacccgctcctttgaaggtgaccccgagcgcgctgccgtactggccggtgcctttatccgcggtatgaacagcgccggcatggccgccaccggcaagcacttccctggccacggttgggccgaggccgattcccacgtcgctattcccacggacgagcgcagcctggaacagattcgcgccaatgacctggtgcctttcgcacgcctgagcaagcaactggccgccgtgatgccggcgcacgtcatctacccgcaggtcgatgcccagcccgccggcttctcacgccgctggttgcaggacattctgcgcggtgagttgcagttcgacggggtgatcttcagcgatgacctgtccatggccggcgcccatgtggtcggcgatgcggccagtcgtatcgaagcggcgctgaccgccggttgtgacatgggcttggtgtgcaatgaccgtgcggcggccgagttggcgctcagtgcagcgcagcggatgaaggtcacgccctcggcgcggattgcacgtatgcgtgggcaggcggttgcctcgacggactataagcaggacccgcgttggctgacagcgcttactgcgttgcgggatgcgcagttgatcggctgaagaccgcggcgcggccatcgcaggcaagccagctcccacattttgatttgtgaatacattcaagtgcgggagcgggcttgctcgcgaaggcggcctaacagtcagcgcttctcttgcttgttgggcagcggcgcaaacaacgcctcaatctcatcattgcccaactgccagtccccagtcgtacgcccatccagcacgcccgccgccagatcggacttctccttctgcaagtgctgaattttctcctccaccgtgcctcgggcaatcatcttgtacacaaacaccggcttttcctgcccgatgcggtacgcacggtcggtggcctggttttccgtggccgggttccaccaggggtcatagtggataaccgtgtcggcttcggtcaggttcaaacctacgccaccggctttcaggctgatcaaaaagatctgcagcttgccgctctggaagtctttcaccggtgtacgtcgatcccgggtctggccggtcaacagagcgtaagcaatcccgcgttttttcagctcagcctcgatcaggctcagcatcgaggtgaactgtgagaacagcaggatccggcggccctcggcaaacagctcatcgagcatgtccatcaggctgtcgagcttgcccgagctgctgccacgggcgggcagggtagcgtcgttgaccagccgcaggtcgcagcacacctggcgcagtttcagcagcgcttcaaggatgatgatctggctgcgggccacgcctttgcgggtgatttcgtcgcggacctttttatccatggccaggcgcatggtttcgtacacgtcgcgctgggcctcgttgaggtcgacccagtggataatctcggtcttgggcggcagttcggttgccacttgctccttggtacggcgcagcaggaagggtttgatcctgccgttgaggtgctgcaatcgcacctcgctggcgcgtttttcaatcggcacgcggtaatcacggttgaaactcttcacgtcgcccagccaacccggcagcaggaagtggaacagcgaccacagctcgcccaagtggttttccaagggcgtgccgctcaggcacaggcgctggcgggcattcagctcgcgcgcggcctgggccgccttgctggacgggttcttgatgtactgcgcttcatccaggatcaagacgtgcaagggcagggcggcgagctgttcgatgtccttgggcagcagggcgtaggtggtcagcagcaggtcgtagtcattcaggttggcgaaatgtttcttacgccccgcgccataaagtgcctgcactctcagctgcggggtgaagtgcgcagcctcatcgagccaattcgggatcaggctggtaggcatcacgaccatgcacggccgatcaaggcgcccggcgattttctcggtaagaatatgcgccagggtttgcagggttttacccaggcccatgtcatccgcgagtatcccacccacctccagttggcgcagtgactgcatccagctcaagccttccagctgataggggcgcaaggtcgcattcaagccttcaggcgccgcgcaggtgaaatccttgatatcgcgcaggcgctgggcgaagttgcggatcttctcgccgccttcccattgcagtggcaggtcttccagcgggttgaggcgtatggcgtcggccttggccaggcgcagcgcggtggtgccggcttcttgcaggtaaaactcgccgagggtcgccagcaccggcttcaagcggccgtagggcagcgccacttgcagcgggccgtggccgttgggcaggccagggatgttcaccaggatcagctcttcatcgcggcgccgcgcgagtttctcggggttgagaatctcggtgtgggagcgcatcaggttcagcaggatcggcagcaggctcaaacgttcgccgttgacgatgatgcccagctccaggtcgaaccaatcgcgttccggcccttcatcgacggtggcataccagtcatcgacggggctgaggtcaaagccgaagtcttcatcgatctgcagctcccagccttcggcgcgtaaggtgggcgacacattgagggtgaagttcagccaggcgctgtcattgaccatctcgaacagctcgccggcactttccggcagggccttgctctggcgcgtggcgatcttgaaaccaagcaggcgcaggtgttcgcgataggcctgttcttgctcgggatggcgcttgatccgcaggctctgggtctcctggcgcacaatgatgtcggcattcttttgcccgctgacatagttgcccaggtagttgaacgacaacgccgcacggtgctggatatagcgctgcatcttgccgttgcgcggctcgaacgcgctgaactccacgctggccagccacaggcggggcaccggttgcacgtcgtccatcaccacctggggcaggaccacgcggttatccagcactgcctggagcttttccagcagttgcgcatcctgggccgctgccgggtaggccagggtttcctggaccttgagcagcaccgccgcgatgtgtttgcagttggtgtgcaccgggcacgtgcagcggctgtccaccaggatcagcaggcccttggccgattcgcgcagtgagatggtctggcggtaaacgttgccgcccgagccttcgcaactggcggtgatggtgctgtcgccgcactcgacgatgcgcacgcggttttccagggcgtagcgccgcccgcgctcaaggctttgctctttgaagcggttggcccacgaaggggccaggggtttggtcaacgacgacgtcaggggcatggcgcgcaatcagtcctgaaggtcgggcggtggtgcgctgggtggattggcggtcagcgaggtgatcttgatcagcagcgccaggtggccgccgtccaggtagttgagctggttgttcttggtgcgcacgtctttctggctcaagtgttcgctgttaatcacgctgccgttgccgtcgaactggttgatccagaaatccgcgtcgatatcggtaaagcgccccagttgcaggctcaacaccccttcgatagggaactggccgaattgctcctggccatcggtgatcgccaccttcaccggttgctcgcccaggttctgttcccaggctttgtgggcgagcaccgtgtagttggcgtcggcgcgcagcttgtcgacgatattacccaggcgcggcgggctcattcgctcacccaggcgcggcgcgcccgcatcccagttttccggggcggcgcggctgttgatcaccggttccgcattctggcgcaccaggatcatttccacctgatacaggctgtcggcaaaggccgaaggtgcgagtaccaccaacaacaggctcaaaatgcggaacacgcgcatgggggcgtccttaaacggatttcggaatgaggcgttcaaacagcgcctccaaggtgttgaagcgttcttcggcacgttccatcggcaccatgaacttgaacagcgtagccccttcgaacttgtagcggttgggctggccctggatcagcttgatcagcaccaacgggtcgaccggcgtctgcgcttcgaactcgatacgcccgccttgcggcccggcgtcgactttcttgatgcccaactgctcggcctgcaacttgagcagggtcaggcgcaccaggttcttggtcggctccggcagcaggccgaagcggtcgatcatctctacctgcaagtccttgaggccttcttcgtcggccgccgaggcaatgcgcttgtacaggatcaaccgtgcatgcacatccggcaggtagtcttcgggaatcaacgcaggcaagcgcaggttgatctccgggccgccgcccaagggttggtcgaggttcggttgttcgcctttgcggatggcttttaccgcgcgttcgagcatctccatatacagcgtgaaacccaccgcctggatctgcccgctctggccatcgccgagcaactcgccggcaccccggatttccaggtcgttggtggccagtacaaagcccgcgccgaggtcctgggtattggcgatcgcctccaggcgtttttccgcatcggaagtgatctgctggcgcggtggtgtcagcaggtacgcataagcctggtggtgactacgcccgacgcggccgcgcagttggtgcagttgcgccaggccgaacttgtcggcgcgctcgatgatgatggtgttggcactcggcacgtcgatgccggtctcgatgatggtcgaggcgatcagcacgttgaaacgcttgtgatagaagtcgctcattacctgttcgagttcgcgctcgcgcatctgcccgtggccgatagcgatacgggcctcaggtaccagttcggcgaggtcggcggcgcacttctcgatggttttcacatcgttgtgcaggtaatacacctggccgccgcgcagcagttcgcgcagcagggcttccttgaccgtgctcttgttctgctccatcacgaaggtgcgcaccgacaaacgacgcgccggtggcgtggcgatgatcgacaggtcgcgcatgcccgataccgccatgttcagcgtgcgcggaattggcgtggcggtgagggtgaggatgtcgacttcactgcgcagggccttgagctgttctttctggcgcacgccaaagcggtgctcttcgtcgatgatcaccaggcccaggttcttgatcttcacatcgtccgacagcaacttgtgggtgccgatgacgatgtcgatcttgccctcggccagatcggcgacggcggcgttcacttccttggcggacttgaagcggctcattacctccacggtcaccggccagtcggcaaagcggtcgcggaagctgttgtagtgctgctgggcgagcagggtggtggggaccaggatcgccacctggcgaccgccgtgtactgcaataaaggctgcacgcatggccacttcagtcttgccaaagcccacgtcgccacacaccaggcggtccatcggcttgggcgcgagcatgtcggcgcgcaccgcttcgatggtggtttgctggtcgggggtttcttcgaaggcaaaaccggcgctgaaggtggcgtagtcggctttcgggtcggcgaacgcatagccttcgcgggcggcgcgacgggcatagatgtcgagcagttcggcggccacgtcgcgcacctgttcggcggccttgcgcttggctttctgccaggtctcggagcccaggcgatgcaacggcgccaaggcgtcgtcgctgccggtgtagcgggcgatcaggtgcaggttggccaccggcacgtagagcttggcgccctcggcgtattccagggtgaggaattcggcggcctggttgtcgatctccagggtctgcaggcccaggtagcggcccacgccatggtcgatatgcaccaccggcgcgccttcgcgcagctcggtgaggtttttgatcactgcgtcgttgttggcgtcggcgcgtttttcccggcgtcggcgctgcatcacgcgctggccgaacagcgggctttcggcgatcaaggccagcgccgggtcatccagccgcagcccttcgtccagcggcgcgatggtgatcgccaggcgctctttgctggcgacaaaatccggccagctgtcgacggttttcggccgcagcttcaggcgctccaacagctccagcagcacttcgcggcgcccggcggattcggcggtgaacagtacgcggccggggaagtcgccgaggaagttggacaacgcttccagcggttgcgtggccttggcctggatcgccaaatcgggcagcgcgctcgccgggaaacgctcgcggccactaccggcgtccacgtcctgctggctggcgaccacacgtggccagtttttcaggcgcgcgaagcagtcttccaccggcagaaaaagttcagcgggcggcaataaaggccgggacggatcgacgcggcgttcttcatagcggttgcgcacgtcgttccagaagttttccgccgcctgttcgatacccggcagcgagaacacctgggtgtcctggggcaggtagtcgaagagggtggaagtttcgtcgaagaacaacggcaggtagtactcgatacccgcaggcgtgatgccgctgctcaagtcctggaagatcgggcagcgacggaaatccacgtcgaagcgttcgcgaaagcgcgccttgaagcgcgtgaccgcgtctttttgcagcgggaactcccgcgccggcagcagcttgatcgagtcgaccttgtcgatggagcgctggttctctggatcgaaggtgcgcagcgtctcgatctcgtcatcgaacaggtcgatgcggtacggcaacttgctgcccatcgggaacaggtcgatcaaggagccgcgcaccgcgaactcaccgtgttcgtacacggtgtcgacgcagcggtagccgctggcttccaggcgcgtgcgcatctgctccacatcgagcttctggccgacgtccagcaccaggctgctgccgagcaggaacttggtcggcgccaggcgatgcagggcagtggtgatcggcaccaccagcacgccatgggccagttccggcaagcggtacaggctggcgatacgctgggagatgatgtcctggtgcggcgagaacagatcgtaaggcagggtttcccagtcgggaaaatgcagcaccggcaaatccggggcgaagaagctcagctcctgctccaaccgttcggcactttggctgtcggcggtgagcagcagggtaaagcgcttggctgcgctggcagcctcggcaatggccaggctcagggcggcaccgggcaggttgccccagtgctgtttacctgccgcggcagggagtagcggtagacgcagaacgggcacggaaggttgagctccaagcgttgcgacaaagtcggtaattgtaacggccccaggtgccgcctgtcagttgctgactgtgcctattacggtttgtaggaaatgtagtggctaagacaaacaatggcgggttttgactcaatatgtagtgccaaaatgcgcgaatgtttaggagggttacggacaagtcggcctgctcgccaaactagtggccttctggaacccgcgtgtttcctgggctgtagcgcggtggtatttttttgcaagggctttttgttgcccttggcgcattgctcaacgctcagtcgggcgacataatgtagccccttttttctgcccctacatgtggaaggttcccgtgactcagaagcccgaccagtgtcttggtgaatggatcgaccgtgaagcactcgctgaagcgatgattccgcttatcggtcagctgtaccgcaataacaatgtggtgagctcgatctatggccgcagcctgatcaaccagtctgtcatcgcgattctcaaagcccaccgctttgcgcgccatcgctccgccgacgacagcgaactctccgtccacgaaacattcccactgctcaaagccatgagcgagctcaagctcggcgcggcttcggtagacctgggcaagttggcgtacaaattccgcaaagaaggcgctggccgcaccgccgagcagttcgtgcgtgaagaaatggccgatgtggttggccagcaaaacgctgccgcccgtaaaggcaccgacgtggtgttgtacggcttcggtcgtattggccgcctgctggcgcgcatcctgatcgaaaaaaccggtggcggcgacggcctgcgcctgcgtgccatcgtggtgcgcaaaggcgccgagaacgacctgaccaagcgcgccagcctgttgcgtcgcgactcggtacatggctcgttcaatggcaccatcaccattgacgaagaaaacaacaccatcaccgccaacggtaacctgatccaggtgatctacgcgaagaacccgactgaggtggattacacccagtacggcatcaaagacgcgctgctggtggacaacaccggcgtatggcgtgatgccgagggcctgggccagcacctggcgtgcccgggtgttgaccgcgttgtgctgaccgcgcctggcaagggcaagctcaagaacatcgtgcacggcatcaaccatgctgaaatcaccgctgacgacaagattgtgtccgccgcgtcctgcaccaccaacgccatcgtgccggtgctcaaggccgtgaacgacaagttcggcatcatcaacggccacgttgaaaccgttcactcgtacaccaacgaccagaacctgatcgacaacttccacaaaggcgatcgccgtggccgtagcgccgcgttgaacatggtgatcaccgagaccggtgctgctaccgctgctgccaaggccctgcctgagctggctggcaagctgaccggtaacgccatccgtgtaccgacgccgaacgtgtcgatggccattctcaacctcaaccttgagaaagccgccacccgtgaagagatgaacgagtacctgcgctacatggcgctgcactccgacctgcacaagcagatcgacttcgtcaattcccaggaagtggtctccaccgacttcgtgggctcgcgccatgctggtgtggtggacgccgaagcgaccatcacccaggacaaccgtgttgtgctgtacgtgtggtacgacaacgagttcggctacagctgccaggtggttcgcgtgatggaagacatggctggggtcaacccgcctgcgtttccgcgctaagcctttgcgctgaatgaagaagccccgactggttcggggcttttttatgcctgtgggttttgtggtgtctgggagggccttatcgcaggcaagccagctcccacagttgaaatgcatttacctgtgggagcgggcttgcccgcgatgacgatggaaccgtcaacgccgccctcacttgagtagcgtattgcgcaaactgtccgacagccctttgggacccagccagatacccaggtaggccttcgctaattcagcgtccgggctgctgaacaccacctgcccattaatctccagattcaacccgcgccccggacgaaaatccagggcatagcgatcgccgctgcgaatatcccgaaagcgcgcgtgcagcttggctatctccgagttcaacccggcattggcctgctggcgttccagggtgacggtggccgccttgatcacatcattgcggtcgatgtcgcgaaagtaatacagcgccaggcgcacagccttctgctggtcccaggcctgctttgccggcaggtcagctggtgcatacagcgccgccgcatacacatccgcccacagatagttgaacaccgcctggtttttcaaggccagcccctcgacctgtgccgggaagctcgcctgcttgagccgctgcgcatcgttggcgtgcgccgtgagcgacaccatcagcattaaacaaaaaaatagttgtcgcataatggctcatcctgaattcggcgctggtttgcgtcctgtagtatggcaacactggcctacgacgcgaccaagggttaatgttcgcggcgctcggccttctatagactgtgccccggttcacacacttgagccaaattgtccttcatgcacgctggccgcggcatgatttagcccggcgtccaaccgtacgcctggcctgttctgaggagtacgcatggctgtctacaactacgacgtggtggtactgggttccggcccagctggagaaggtgcggcgatgaacgctgccaaagcagggcgcaaggtggcgatggtcgatagccgtcgccaggtcggcggtaactgcacccacctgggtaccatcccgtccaaggcgttgcgtcactcggtacggcagatcatgcagttcaacaccaacccgatgttccgggccattggtgagccgcgctggttctcgttcccggacgtattgaaaagcgctgaaaaagtcatctccaagcaagtcgcctcgcgtaccggctactacgcccgtaaccgcgtcgacctgtttttcggcaccggcagcttcgccgacgagcaaaccgtcgaagtggtctgcgccaatggcgtggtcgagaagctggtggccaagcacatcatcatcgccaccggttcgcgcccgtatcgcccggcggacatcgatttccaccacccgcgtatctacgatagcgacaccatcctgagcctgggccacaccccacgcaaactgatcatctacggcgccggcgtgatcggctgtgaatacgcctcgatcttcagcggcctgggtgtactggtggagctggtggacaaccgtgaccagttgctcagcttcctcgactcggaaatttcccaggcgttgagctaccacttcagcaacaacaacatcaccgtgcgccacaacgaagagtacgagcgggtcgaaggcctggacaacggggtgatcctgcacctcaagtccggcaagaagatcaaggccgacgccttgttgtggtgcaacggccgtaccggcaacaccgacaagttgggcatggaaaacatcggggtcaaggtcaacagccgtggccagatcgaagtggatgagaactaccgcacctgcgtgccgaacatctacggcgccggtgacgtgatcggctggccaagcctggccagtgccgcccatgaccagggccgctcggccgctggcagcattgtcgacaatggcagctggcgctacgtgaacgacgtgcccaccgggatctacacgattcccgagatcagctccatcggcaagaacgagcacgaactgaccaaggccaaggtgccttacgaagtgggcaaggcgttcttcaagagcatggcgcgtgcgcagatcgccggtgagccgcaaggcatgctgaaaatcctgttccaccgcgaaaccctggaagtgctcggcgtgcattgcttcggctaccaggcctcggagatcgtgcacattggccaggcgatcatgaaccagccgggtgagcaaaataccctcaagtatttcgtcaacaccaccttcaactacccgaccatggccgaagcctatcgggtagcggcctacgacggcctcaaccggcttttttgagcggctccggccggtggcctgagccggccggggagaccgatttcagtaattctcgagggtggcagtggccaaaccgggaaagtctgtaatcaggctatctacgccgaagtcggcgagcctgcgcatcagcgcaggttcgttgactgtccacacggacacatgcaagccctggcgctgggctttttccagccgctcgggggtgcacagcgtccagttcaatgccaagtactcacagccgtagttctgcgcgaccttcagcgggtcgagccaggcgtattcggcgaccaggccgcgtgacaggtctggggtgagttccacggcggccttgagcacttcccgcgagcttgacgtcaccgtgaccttgtccatcaagccaaagcgcacggccatttcgcgaatcgccagcacggtggtcgcggcgcgggtacgcgaggcgcttttgacttccagttgccagtgatcgaagtcgcactgttcgaacaacgcctccaggcgcgggatcgggcaggggctgacccagcctgggccgcctttgcgcgcgtccattttcaccaggtcggccgccgaatactcgacgactttgccgcgccggtcggtggtgcgcttgagggtcgggtcgtggatgaccatcaactcgccgtccatggacaggtgcaagtccagctcgcagcggcgtacgccgtgcttgaggcattcctgaaaactggtcagggtattttccggtgcttcgcctttggcaccgcggtggccgtaaatcagggtcacagttgctcctttgcgccaggatggctggcgtcgtgaatgcgtattcagaggtcttcgctttgttctcgcgccaggcggcgttcctgggcctgtttctgcaggatatagcgcgccagcagttggcgttgggcatcggtcatggactcgaattccgtgcccacatcaaagccgtcgcccttggggtcgcaatgggtcacccgcgcgcgtagcaacagaccgagcgcctggggcatcagcaccagcttgaccgctaggtgagtgtcggcggccagcggcgtggggtgctggaagtcgatgccgccttcggagaggatcaccggttgcggcgcacctacctcgttcagcaaaccgcgagccatgacctggctgagcaggtccaggcgtttgttctgcactttgaggaacgccgcgaggctgcggtctttctcgttgatctggcgcagcaggtgctgggcttcgaattcgctcaagtgcagctcgctgagcagattgaacagcggcgaatcatccagcaacacttccttgctcgccgcgtcggggccagacagggggttgatttgaagtgcgatcatgtcgtcgatacggtagtattcgcggcgctcttcttcatctaatgtcgacatggcgaaccccaggttacggtaatggtctgagtgtaaagctgctgaccagaccccgccaccgggacgtcttcttttcctccgaacaagccccgacatgttcagacctctcttcgtatttatcggcacgcgttatacccgtgcaaagcgtcgcaatcattttgtgtcgttcatttccttgacctcgatgatcggtctcgccctgggcgtggtcgtgatgatcgtggtgctgtcggtgatgaacggcttcgatcatgagatgcgcacccgcgtgctgggcatggtgccccacgcgaccattgaaggcgatgcgccgatcaatgactggcaaagcctggccgccaaggtccagcagaaccccaaggtggtggcggtcgcgccgtttacccagatgcaggggttgctgaccaacgacggcaaagtgcagaagatcctgctcaatggcatcgacccggcccaggaacacaacgtctcgatcatcgacaagttcatgctgcaaggtaagctcgacgcgctggcgcccggcagcttcggcatcgtcatcggtgacaaggccgcggccaagctgggcgtggaggttggcgacaagctgaccttcgtcgccccggaagtcaccgtgaccccggccggtatgttcccgcgcatgaagcgctttaccgtggtgggcaccttccacgtcggcgctggcgagatcgacggttacatcggcctgaccaacctcaccgacctggcccgcctgcaccgctggcagcccgaccaggtgcagggcctgcgcctgaaattcaacgatctgttcgacgccccgcgcggcgcctgggaaattgcccagcacctgggtgagaccgagtattacgcccgcgactggacccgcacccacggcaacctgtaccaggccatccgcatggaaaaagccatgatcggcctgctgttgctgctgatcgtcgccgtggcggccttcaacatcatctccacgctggtgatggtggtgaacgacaagaagggcgacatcgccatcctgcgcaccctgggcgctacgccggggcagatcatggcgatcttcatggtgcaaggcacggtgatcggcgtcgtcggcaccctgatcggcacggcggtgggcattctggccgcgctgaacgtcagcgccgccattgccctgcttgaaaaagtgatcggccacaagtttctcaacgccgacgtctacttcatcgattacttgccgtcccaggtgcaaacccaggacgtgctgatggtgggcggcgccgcgttggtcctgagcttccttgccaccctgtatccagcctggcgcgcggcacgtacccagccagcacaggcattacgttatgagtgaatcgggcatgagtgaaaaagcaatcctgagctgccgcaacctgggcaaatcctacgaggagggcccggagtcggtggtggtgctgtccaacctgcagcttgaactgcaccctggcgagcgcgtggcgatcgtcggcagttccggttccggcaaaagtaccttgctcaacctgttgggcggcctcgatacgccgtcccagggcagcgtctggctggccggtgaagaactgtcggcgttgaatgaaaaggcccgtggccaactgcgtaaccgctcgttgggctttgtgtaccagttccaccacttgctgccggaattcaccgccctggaaaacgtgtgcatgccgctgttgatcggcaagaccgcgattcctgaagcgcgccagcgtgccacggcgttgcttgagcgcgtcggcctgggccatcgcctggagcacaagccagcggagttgtccggtggtgagcgccagcgcgtggcgatcgcccgtgccctggtgaacaaccccggcctggtgatgctcgacgagccgaccggtaacctcgactctcacaccgcccagggcatcaaggacttgatgctggagctgagcacccagatgcgcaccgcgttcctggtggtgacccatgacatgagcatggcccggcagatggaccgcgtactgcatttgcaggaaggtcatctggtcgctatctgacctgttgcaagcccggttttttgaggccgggctttttcatttttccaacggtgcccgcgaatgttcagaccgttatccattttcatcggcacgcgctatacccgcgccaagcgccgcaaccgttttgtctcgtttatctcgatgacctccatgatcggcctcgccctgggcgtgctggcgatgattgtggtgctctcggtgatgaacggctttcagcgtgaaatgagctcgcgcatcctgggcatggtgcctcacgcgaccatcgtcggcgtaaagccgattgatgattggcagccggtggccgccgccgcgatgaagaacccgcaagtcaccgccgccgtacccttcacccagatggacggcatgttttcctataagggcgcgatgcagccgatcgaaatcagcggcgtcgacccggcccaggaaggcaaggtgtcgatcgtggcccagcacatcgtgcgcggcaaactcgacgacctcaaacccggcgagttcggggtggtggtcggtgatatcaccgcacgccgctttcgcctgagcgtgggcgacaagctgaccctgatcgtgccggaactcagcagcgcgccgggcggcatcaccccgcgcatgcagcgcctgaatgtggtgggtatcttcaaagtcggcgccgagttggatggctccatggccctgatccacatggccgacgccgctgaaatccagcattggcagcccaatcaggtgcaaagcgtgcgcctggcggtgaaggacctgtatgcagcgccgaaagtctcggcagatatcgccgccagcctgggcgcggcctacaagccggacgactggacccacacccagggcagcctgttcagcgcgatgaaaatggaaaagaccatgatcggcctgctgttgctgatgatcgtcgccgtggccgcgttcaacatcatcgctaccttgatcatggtggtgaacgacaagggcgcggacatcgccatcctgcgcaccatcggcgccacgcctcggcagatcatggcgatcttcatggtgcagggtactgtgattggcgtggtcggcaccttgatcggcggcgtgctgggggtgattgcggcgctgaacgtaagcgagctggtgggctggctggagcgggtgagcgggcagcatatcttcagttcggatgtgtactttgtcagcaacctgccgtcggagctgcaaggtggggatgtgttgctgatttgctcggcggggtttgtgttgagcttcttggcgacgatttacccggcgtatcgggcggcgaagattgagccggcgcatgcgctcaggtattcgtaacctgatcgttcccacgctctgcgtgggaatgcctcaccggacgctccgcgtccgctgttaggacgcagagcgtcctggactgcattcccacgcggagcgtgggaacgatcagcagtcgcccttaggcaactcaatcacaaaccgggtccagcccgcctgcgactcacaataaatcctgcccccatgggcccgcacaatcgactgggtaatcgccaaccccaaccctgcatgttcgctgctgcctgcacgcctcgacggatcggctcggtagaaccggtcaaacagccgcggcaataacggcgcaggaataccttccccgctgttttcaaccgtcagtgtcacgccactctcgagccgcacccgcacttcaccgcctggtggggtaaaccgcagcgcgttatccagcagattcgacaaggcccggcgcaacataccgcgatcgcccatcgtctgggcgctgccttcgcgcaccagcctcacctgcgcgtcctccgccagcagggtaaagaactccaacagtgcgtcgacctcatcgcccaaatccagagcttcacggctgggcatcagcaagccgtggtcagctttggccaggtaaagcatgtcgttgaccagttgcgccatccattgcagctcttccaggttgctgtgcagcgcctcgcggtaatcctccagccggcgcggttgggtgaggatgacttgggtctgggtcagcaggttggacagcggtgtgcgcagttcgtgggcgatatccgcgctgaaggcggacaggcgctgaaaggcatcgtccaggcgcgccagcatagcgttgacggcctgggccagttccgcgagttccaccggcatttgttcttggggtaagcgttgcgtgagggagtgcgcggagacgctggcggccacttcgcccatgcgccgcagcggtcgcaagccactgcgcgcagcccaggcgccgagcagggcggtggccagggccgagaggctcacggtcagccagatcaagcgttgcatgcgttgtagaaagtgctggtggtgagtgatgtcgaggatcagggtcagctgtggcgaatccagttggctgggcgtcaagggtgcgatgaagacgcggtagtcggtgcctgcgtattgcaggctgtgcaggccgggtgcttggggcaagggaaggtgtggcgcgccgtccagccaacgttgacccgccccggtgatgcgcaaggtgaggtcgggctggtgatcgagttcggcacgcagttgaggggtgcgctgggcgaggtcttcccgtgaggtgacaccctgcaaggtgctgcgcagggccaccagtttgctttcgagctgttgctggtccagctccatgaagtgcgcctcgctggcccggttgaacagcaccccggcgatcaacgagaccaccgccgtgcaggcggcaaacagcagcgccaggcggctggtcagggacaggcgcttgatcacgtgaaccgttcctccagcacgtaacccatgccgcgcacggtgtggatcagtttgttggggaaattgtcgtcgaccttcaggcgcaggcggcgaatggcgacttcgatgatgttggtgtcgctgtcgaaattcatgtcccacacctgggaggcgatcagcgtcttgggcagcacttcgccctggcggcgtagcagcagctccagcaaggcgaactccttggcggtgaggtcgatgcgctggccgctgcgctcgacgcggcggcggatcaagtccaggctcaggtcggccagttgcagcgtggtgtcctgcggcgtgctgctgccacggcgcaacaaggtgcgcacccgcgccagcagttcggaaaaggcgaagggtttgaccaggtaatcgtcggcgcccagctccaggccatgtactcggtcttctacggcatcgcgagcggtgaggaacagcaccgggatgtccaggccggcactgcgcaccgcctgcaggatttgccagccatcgcggccgggcagcatcacatcgaggatcaacaagtcatagtcgcccgtcagcgccaagtgctggccacaggtgccgtcggccaccagttcggtggtaaagcccgcttcggccaggccctgacgcaggtaatgaccggttttgggttggtcttcgacgatcagcagtttcatgtagggctcttggtcaaggtggacgccggcctttataccctgggctccggggtatgggcgcaagctgacaaagttgtaatctagcagtcagctgactggcagcgaggccatcttaaagtgttgcccaagctggatacctattttggagagtgaaagatggcgttgcgtacaccccagttattggcgggctgcctgttggcgttgagtttcaatgcactggcggatgcgactcacacctacgcgttcggacagccggccccggcggataaagccacgcgcaccgttgaagtcacgctgcgggacattgcctttgagcccaagtccctggacgtcaaggccggtgaaaccgtgcgcttcgtgctagtcaacaaaggccagttgctgcatgagttcaacctgggtgacgcggccatgcatgccgcccaccagaaagagatgttgcagatgcaagccagtggcatgctcaccgccaccggcatgggcaagatggatcacagcgccatgggccacggcgacatgggcggcatgaagcacgacgatcccaacagtgtgctggtggagccgggcaagacggccgagctgacctggacgttcaagcaggccacgggccttgagttcgcctgcaacctgcctgggcattaccaggcaggcatggtcggcaaactgaccgttgagtgaggcgtttgttaagggcgggggcaaaggctggtagactggcgcggtttatttagccaggtttccgccatgcatcccgcagccgaacattcgccgctgggcaagtccagtgaatacatcagcacttacacgccttcgttgttgttcccgattccacgcgccgccaagtgggccgagctgggcctgagcgccgagaccctgccgtacaagggcgtggatttctggaactgcttcgaactgtcctggctgttgccctcgggcaagccggtggtagccatcggtgaattcagcattccggccgactcgccaaacatcatcgagtccaagtcgttcaagctgtacctcaactcgttgaaccagaccgcgtttgccgacacgcaaagccttgaagccaccctgcgcaccgacctcagcgctgctgccggcaagcccgtgagcgtgcgcattcgcagcctggccgatattgaggccgaaggcgtgatggcgctcccgggcgtgtgcattgacgacctggatatcaacgtcagcagctacgaacacccgcgcccggaactgctgcgttgcgatgattcgcgcgtggtggaggagagcgtgcacagccacctgctcaaatccaactgcccggtgaccagccagcctgactggggcagtgtggtggtggaatatcgcggtgcggcgctggatcatgccagcctgctggaatatatcgtcagctttcgccagcactcggattttcatgagcagtgtgtggagcggatcttcctggacttgcagcgcttgctcaagccggagaagttgacggtgtatgcgcggtatgtgcgccggggtgggttggatatcaacccgtaccgcagcactgagaacacccagttcctgaacgtgcggctggcgcgccagtaaaccttcatacaaaaaactgtgggagctggcttgcctgcgattgcgatctttcagtcattcatcaagtgactgatacaccgctatcgcaggcaagccagctcccacatttggttgtgtgtttggcttgggattgggttagatgccgatattgcccagggtcagcacgatattgcgcaacgtcccggcaatgcctggatggtccagttcaaaaccttccactgcccggttcacatcgtcagcgatgctgggcgtctgggtggccggttccatttccaactggacttcgaatttggcgatcaactcttccaatgcttgacgtttctcggcgggcaactcgggatgattctccagttgctcacgcacaatatcggcctgctgttgtaacttctcgcgatcaggcatgacgttctttccttttatcgataggcactggcatagaccgcggcacgccgtgaaaggtctacgggctgacctgtagattaatccactgcggccaactgtgcatgatctcgatcagggcttctcgcccttgagctggcgcaggcggatgtcggccaggcaggtgccgagttcgcccaggtggtcgatcaccgagtgcacgcccaggccatagagtgccaccgtggccttgccacgcttgtgttcgcgttgctgctcggtcagcgcctgccattgctggggcgacaggccgcagagcgaaccgcaggaggccaggccgatggtccacaaaccggcgttcaggcccgattgcagcaggcgcggctcgccgctgaccagtacgcagccttccaggcgttcgatgttcaactccatcagggcttgccagcaggcgtggggcgcgggccagcgaatggaggagggtgaggcggccttgagccagccaggcaggccggcgcacagtggcgtggtcacggcgggaggcagttcgtccagccaggcgcagggcacgccttgttctttgaggctgcgcaggattttcaatgcgcccggcgtggcctcggcatccgcgcacggtgagtcggtgcgcgccagggaaccaaaatccaccaggcagccactcaggccaaataacacggcggtcaatgagggggctgcggcgacggcaatctcggcgtgtggcatctgaacgtccctgaaatagctgccacgctatcggggcggcatgacaaggggatgacactgtcgatatttgtaggaattttgtgcattttacgtaagacgattctaggtagctgcctaaatcggcacttccgtcatatactgacggccttattcagggcatagcgcccatgacagaccattcaaggagcaaaagctatgcgctggagccagtacttcgctcagctatcggtgtgtgccaccatcctgttggcgcctttcgctgcccaagcggcctcggaagatgacccatgggaaagcgtcaaccgccccatcttcaccttcaacgacaccgttgacacctatgccctcaagccaatcgcccagggctatcagttcgtcaccccacaatttgtgcaggacggcgttcacaacttcttccgcaacatcggtgatgtcggcaacctggccaacaacgtgctgcaactcaagccgcacaatgcaggcgtcgacactgcgcgcctgttggtcaacaccacgtttggcgtcctgggctttatcgacgtcggcaccaaaatggggctgcagcgcagcgatgaagacttcggccaaaccctcggctactggggcgtgggcagcggcccgtacgtgatgatcccgttgctgggcccaagcaccttgcgcgatgcaccgtccaaatacgtcgacagctacacccaaccgtaccgctacatgaacgacatcggctggcgtaacagcaccttcggcctcaacgtcgtcgacgtgcgcgccagcctgctcgacagcgagaagctgatcagcggcgacaagtacaccttcattcgtaacgcttacctgcagaaccgcgagttcaaggtcaaggacggcaaggtcgttgacgacttttaagctgtgacgttttgaaatgaaaaaggcgaccttcatagggtcgccttttttgtgcgcactgatcgttccccacgctccgcgtgggagcgcctcctgtgacgctccgcgtcacccttgcgcaggggctggatgctgcgttagcgcattttcagaatcttgaggcccagatgctggtcatcgcctactgccttggtccacaccacctcggtatccgcttcaagacccctgagcgcagcgtgttctgaatcaatgcgcacggtcagcaggtcacccaccgtgaactggcgaggtgcctgcacttgcatgccggaactggagaggtccacgcaggtaccggcgatctcctgcccggcatggatcaaagacacatcggcatctattcgcatgcggatgaaatcgcgtttttcggcgtagtcgcgctcgtgttcgctcacagcatccatccttactttgcgttgtggttgtgagggttcttataactcccggtgatttgcggtgtaaagacgcccggcgaccatcggcatgagcttgaaacccctcacggatgggagtaccgtctgcgccttagaagggcacctctgctttaccgttgtgcatgggccaaatcccaatgctttgtaggacagagaggctagaaagcgaatccagtacgtgagcccggccattgccgagccgcctacgccaacctaattctggcgccgtttgcccacatgcaaaaaaccagtgccacgctgctgataatcgatgacgacgaagtagtgcgcgcgagcctcgcggcctacttggaagacagtggcttcagcgtcctgcaggccagtaatggccaacagggtctccaggtattcgagcgcgacaagcccgaccttgtgatctgcgacctgcgcatgccccagatgggcggccttgagctgattcgccaggtgaccgagcttgccccgcaaacgccggtgattgtcgtgtccggtgccggtgtcatgaacgatgccgttgaagccttgcgcctgggcgccgccgattacctgatcaagcccctggaagacctggctgtgctggagcactcggtgcgccgcgccctggaccgtgcacgcctgctcctggaaaaccagcgctaccgtgaaaagctcgagaccgccaaccgcgaactcgaagccagcctgaacctgctgcaggaagaccagaacgccggtcgccaggtgcagatgaacatgctgccggtcagcccctggaccaccgacgaattcaagttcgcccaccagatcatcccgtcgttgtacctgtcgggtgattttgtcgactatttccgcgtcgatgagcggcgcgtagcgttctacctggccgacgtttccggccacggcgcgtcttcagcgtttgtgaccgtgttgttgaagttcatgaccacacggctgttgttcgagtccaagcgcaatggcaccttgccggagttcaccccctccgaggtgctgggccacatcaaccgaggcctgatcagctgcaagctgggcaagcacgtgacgatggtcggcggcgtgatcgacgaagaaaccggtcttttgacctacagtattggcggtcacctgccgatgcctgttttatacactcctgacagtgtgcgctacctggaagggcgtggcctgcccgtaggcttgtttaacgaagccacgtacgaagaccacatcctggaattgccgccgaccttcagcctgacgctgctgtccgacggaattctggaccttcttccagagcctacactcaaagagaaagaagccgccttgccccaaaaggtcaagtcggcgggcggcagcctggatggcctgcggcaggtttttggattggccacgctaggggagatgccggatgatatcgccctattggtgttgagcaggaatctttgatgagtaccggaagaatccaattcgccgagcaagacgggaccttcgtcctgaagtttgtcggtgaagtgcgcctgaccttgtgttcggccctggatgcgacgatcgagcggatcttcacagcgctgaacttctcggcgatcgtgatcgacctgaccgaaacgcgcagcatcgatagcaccaccctgggcctgttggccaagttgtccattctgtcgcggcagaaggtcggcctgttgccgaccgtggtcaccacccacgaagacatcacccgtctgttgcagtccatgggctttgatcaggtgttcaacatcgttgatcgcccgatcccctgcccggaatgccttaccgacctgccgtcccaggaccagtccgaggaggtcgtgcgggtcaaggtgctggaagcgcacaagatcctgatgggcttgaacgagtccaaccgcgaagccttccacgacctcgtcaacgccctagagcgccactgacagcctccctgctcaaacacacacagtccaatgtgggagctggcttgcctgcgatagcgcactgtcagtcgatgaagtgttggctggcccaccgctatcgcaggcaagccagctcccacactggacggcggtgacagcgaggcaaaaaaagggcggcaccctcacaggtgccgccctttctgctgctatctgcccttacagcttggccgacaacaacgcctccagcttctcctggtcccgagcaaactgacgaatcccctccgccagcttctcagtcgccatcgcgtcctcgttggactcccaacggaactgcgcttcagtcatatgcacccgtgcttcaccggcatgccctggcgccaacttgcgttcaagcttgccttcatcggctgccagcttctccagcaggtccgggctgatggtcaggcgatcacaccctgccaactcctcaatctggctgaggttacggaagctcgcacccatcaccacggtcttgtagccgttagccttgtagtagttgtagatgcgcgtcaccgactgcacgcccgggtcttcggagccggtgtagtcgttgccgttggccttcttgtaccaatcgtagatacggcccacaaacggcgaaatcagaaacacacccgcttcagcacaagccacggcctgggcaaacgagaacagcagcgtcaggttggtctggatgccttctttttccagcttctcggcggcgcggatgccttcccaggtggaggcgatcttgatcagcacgcggtcgcggctgaccccggctttgtcgtacaggtcgatcagacggtgcgcacgcttgagaatcgcggcctcgtcgaacgacaggcgcgcatccacctcagtggaaatacggcccggcacgactttgagaatctcttgacccaccgccaccgcaaagcggtcactggccaggcccacatcgccgttgcagtcctgcacacactcatccagcagcttggcatagccaggaatcgacgcagccttgagcagcagggaagggttggtggtcgcgtcttgcggcttgagcttggcgagcgtggagaaatcgccggtatcggctacgacggtggtgaattgcttgagttgttccagcttggaagtcatgggcgtgctctgtcctgtgggtctgatgacattacccgagcgctggcaggcgctcaagggcgcaaatgcgttaggtcgtttgcgagggcaataacctggaaacagccgtttgaattaccggccgtggtgctaactaggaggccagaatcgccgacaggttccccccaactgctcgatgccctccgatcaaactgtgggagccaacttgcctgcatgacgccagcccagccactgagattcacctagcccccatcggtcaaactgtgggagctggcttgcctgcgatgacgccagcccagccaatgatattcacctgacacacatcgctcaaaactgtgggagtgggcttgctcgcgaaagcagcctgtcagccccaaataccaccactgacacccaacccgtcaccgcccctccaacaattcccccgcctgatccagcaacgccaacggatcactcgccttatgaatatccaccgacaacaactgccgaaacttgcgcgcccccgggaaaccggtccccagccccagaacatggcgcgtaatgtgatgcatcaagccacctgtcgccaagtgctcggctatatacggacgcaactgcgccaacgcctcagcgcgggtgatcacaggcgcggtgctgccaaacagctgctgatccacctccgccagcaaatacggattgtgataagcctcccgccccaacatcaccccatcaaacgtctgcaaatgttcctggcactgctccaacgtcttgatcccaccgttgagattaatctccaacgccggaaaatcccgcttcaactgcgccgccacgtcataacgcaacggcggaatgtcccggttctccttgggcgacaacccctccagaatcgcaatccgtgcatgcacggtaaaactggtgcaaccggcatccttcacagtcccgacgaaatcacacagctcggcataactgtcccggccattgataccgatacggtgcttcaccgtcaccggaatcgacaccgcatcgcgcatcgccttcacacaatccgccaccagggcagggtgcgccatgaggatcgcgccgatcatattgttctgcacccggtcgctggggcagccaacgttcaggttcacctcgtcataaccagccgcttcggccatacgggcgcaggcggccagatcagccggaacactgccgcccaattgcagcgccagcgggtgctcggcttcgttgtggcgcaggaagcggtcgtggtcgccgtggaggatcgcgccggtggtgaccatctcggtgtagagcagggcgtgtttggagagcaggcgtaggaagaaccggcagtggcggtcagtccagtccatcatcggggcgacggagaagcggcgggagagtggggcggtttgtagggacatgggggatctgagttggcaaggcgaatggggcgcagtttatcaggaacggatcttgggtgccggtgaggcaagttttgcgcgcattaccacttcgaacgagggcgttgccgtgtgtggaatacaccaaggatctgcagtcgatcaccccgcactctatacgggatcagataggaccagttggggactgcccattcgcgggtatgtttcacccgaccttcgcgtcctatagaaggaaactgagccagcctgtcgacgctggcgaaaatggcatccgagaagtcgtcagcggcttttggattttcgagagcgatataattcgcttcgtcttccagatttttgagtgctttttcaagccactcaacccgcattccggctccagcgcctagcgcgcatggctgccacttggtcatcggtggcgaatttgccttcgtcggcttcctttactgccagctcgatttgggcggtcagcgttttctcgtgctcgatgtagtcgcgaagaacgtccatcgccaggtagcttgctgtctggccgttggttttggccaggtcggcgagagagttggacaggtcttccggcaggtttagggatatcccagtcatggcggtctcgatggtggacggttgtggggcatcttacaccttgatgtgcttggttgactcagcagtccgtcgtgaggtgtatctggaagtgaattgcttttcgctgtctactcaaaattaggtaccgtagtctggcttcgatatctgcccatgagtgacgcggttcacgtcatcggctttcgtgaagccaacaaactgggggggcaaaaataatgaccagaaactcccgttctgaaagggttgatgcagtgaacccggaatggccggctgaggacttttctaaggccaaaccagcgagcgaggtgcttgtgggattgtttggtaaagctcaggcgaaggaaatgctcaagcccaagcggggcaatcggcagtaaccaaagagcacttcaaagttcgttttgacgctgacgtgctggagcgattctgcgctttcgggctaggctggcaaaacgcgaatgaatgccgcttggccgattggctcaagacgcccacgccagatgagctgaaggcctaaggcaataagccacggatttggcttattgctgtctcgtgattagcttttttcagcgatagcatcaataaatctgtcccttttttgtttagctgcctgatcaagtttgagaccgtgttattgcgttggcgagctgttcggcgttgttgcgcaattcaatgaatttttcgtttagctcgacatgacctggattccaagaaaggacgccatcgacatagctttgaccaagaatgagatcatttaatgagcccattccgccataggctgatagtagatactcaatcccagagtaatcagaatccagcaatagtgcccttgccttacgcatccaaaagctccagtgggtgtctccatcgctttcgagcacgattgcaagctgatcaagaatgcagatcaactcttcagttttcggtcccatttctcgacatcgtccaaagtgaaacgcggcatgggcgggatgatccgctgttgagtgtttctcgcccgctagcaacataagctactgtttcgccattagagtgtccacgagctgttttcggccgttatctgcctgatgccgaaggcggatagtcagggcggaggtatggatcgaaaggagtccagtggtacataagtggtacgagctaaagctgggttaactgtaggcctttgttttaaaggctctttggtttagtagttccaatccatcatcggtgtaacggataaagcaatctactggaacaggtccaaacttctaggaaatatcccacgcttttctaagcttgcccctcagaccacccctagctaacctcctcaagccgctggcaatccagcggccggatgtggaagtccgaccaagctgaaggcgctcaatcgcccataaacacctaccggcgtttttttacgtctgtatgattgcttatggcggctgtgcgcggggcacttctgtgcgccgggtcctttagccctggtcttccacacctgcgtacagctgccacccctcatgtggaagtgagataggcagttccttaaacgctaaaggagcttcgccatgtacaaggtcacacctaatccgccttatgcttcaaacgctgcatcttctgatcccaagcttcaagccgcagcccatcgcgcaatcacccatcacttgcccccatccgacgacgttgcgcccgccgaacacccaagcaacaacctattcctcgtcaacccaaccatcgaccccgaaaccctcctggccaacgccgccgaaaacctcgcatccgccaacgaaatggccgccaccttggcattcgatctcgacgactcccagcgcgccatcgccctgggcattcagcagttaatcgagttgagctcgctgctcgttgaccgagcccaggaacaagttgcgcctctaaccgctccagtcaaagcctgacaaccaaccccgccgccttacccaaggcggcaacctgaactcatgctgtcccccagcaaagtttcataattccctgcgccgttgaggtctacgatcccctactgagagaggaccccagcgcctccagcccacagggagttgaaaccatgatctcgaacctcgtcaaagttgtgatgatcaccggcacgttgttgttaagcgcttgttcatcttcatcgagcgtgaccagcagcgacccgtgcttttcgggcgggtgccaggcatttggtgaccatagccccaacaaagccgcgaagatgaatttcggtggcagtgggctggggagtagttatggggagtatggttcggggctgttgcatgatgattgatgggggcggggcaagcactaatgcctgccagttaagcgtcatcgccttctgtaggagcgagcttgctcgcgaaaaacgtcaacgataacgcgggcttcctggatnnnnnnnnnnnnnnnnnnnnnnnnnnnnnnnnnnnnnnnntggatcaaactgtaggtggggcttcctgagtgaacgcggtgccggtgagtttttcgcgagcaagctcgctcctacaactggaagccccacctacagtttgatccagtagggcgttagtggccgcctttcattcgccgggcgatcaggtagagacccaggcccaccagcgctgttgcggcgccgatgtagccggtgctggtccagccgaggccggcagtaatcgccatcccaccaaaccacggccccagcgcattcgccaggttgaacgccgcatggttcgacgctgccgccaagctcggcgcttcgtgggcgatgtccatcaagcgaatctgcaacggcgccgccaatgcgaccatggtgcccaccaaccccatgctcagcaggacgccccacagcgacgaggcggcgaaggggaagaacagcagcacggccatcgaccataccaatatcaaacctaccgcccgaaactgcatgcgatcaaacagtttgccaccggcaatgttgccgatgatgccgcccacgccaaacgcggcaaggccaaacggaatccactgcggcgagaccttggtcacttcgagcatggtcggcgccaggtagctgaatacgcagaacatgccggcaaagccaattgcgccgatggacagggccatccagacctggggtttggtgaaggcgcgcagttccttgcgcgggtcgctgcgttgttcgtcgtggcggtggggcacgaattgccagaccagggcgatggtgagcagggcgatcacgctgaccagggcgaacgccgagcgccagcccaggtgttggccgaggaaggtggcgatggggttgcccagcagcatggccagggtcaggcccatcatcacgcgggccacggcgccggcgcgtttgtcggtgggtaccatgctggaggcgaccacggcggcgatgccgaagtaggcgccgtggggcaggccgctgataaagcggaaggccaccagcgagccgaaggtgggggtgaaggcggtggcgaagttgcccagggcgtacaggcccatcagcaacagcagcatgtgtttgcgcagcagcttggcgccgaggatggccagcagcggggcgcccaccatcacgcccagggcgtaggcgctgatggcgtggcccacctggggttcgctcaggcccaggttctgggcgatgtcgggcatcaggcccatgatggcgaattcgccggtgccgatcgcgaaggcgcccacggccatggccgcttccattttggcggcgctgcgcgcgggcagtacctgcccgggtgtttgctggatagtcatgggtaactctgtgtggaaggtgtgcacgaaggacggtcgccgatgctacgcaagccgcgacgaaggtgtctagaaccgtcattttcggcagagttccacgcctgtgaccgcaggtcgcggctgccaggcttgacaggagcgcattaaaacccgcgatttaggcctgtcaattggccaaacggcgcataaacgctgtttagcgtgatattctgcgcgccgtcttgggctagtctttccctggtgcgtacacccgtatacgtcccagcggttggctgttgcccaggtagctgagccaataatgataagaagtcagcgcagaagggacataacagtgaggtcgatccatcggccttgtgtgcccaccctgcagcctttatgtgactgtgcagaccccgcggtacgttgcctgacgtagcgtgaacgagggttactcatgaccaggggcggtagggcggatggcgttttatcataggtgctactgatgtttaaaaaagtaaacactgccctgctggggctggctttgtcgatggggatcacgtccgttcacgcggaagaggcaaagaaagtcgatgtgctgctgatcggcggcggcatcatgagtgcgaccctgggtgtctggctcaatgagctggaaccggactggtcgatggagatggtcgagcgtctcgatggcgtggccgaagaaagctccaacggctggaacaacgccggtaccggtcactcggccctggctgagctgaactacaccccggaagacaagaacggcaacgttgagatcccgaaagcggtcgagatcaacgaagcgttccagatctcccgtcagttctggtcctggcaggttcagcagggcgtgttgaagaacccacgttcgttcatcaactccactccgcacatgagctttgtgtggggcgatgacaacatcaagttcctgaaaaagcgctacgaagccctgaaggccagcccgctgttcgctggcatgcagtactccgaagacccggcgcagatcgccaagtgggttccgctgatgatggaagggcgtgaccccaaccagaaaatcgcggccacctggagcccgatcggcaccgacgtgaacttcggcgagatcacccgccagttcgtcgctcacctgcaaaccacgccgaagtttgacttgaagctgtcgagcgaagtgcaggacatcaccaagaacgccgacggttcgtggcgtgtgagctacaaaaacctcaaagacggcaccaagactgaaaccgacgccaagttcgtgttcatcggcgccggcggcggtgccctgcacttgctgcagaagtcgggcattcctgaaggcaaggaatacgcaggcttcccagtcggtggttcgttcctggtgaccgagaacccgaccatcgctgagcagcacctggccaaggcctacggtaaggcttcggtaggttcgcctccgatgtcggttccgcacctggacacccgtgtgctggatggcaagcgcgtgattctgtttggcccattcgcgaccttctcgaccaagttcctgaaggaaggctcgtacctggacctgctgaccagcaccaccacccacaacatctggccgatgaccaaagtcggtattcgtgaatacccactggtcgagtacctcgccggccaactgatgctgtccgatgacgaccgcttcaaggcactgcaagagtacttcccgaacgccaagcagtccgactggcgcttgtggcaagccggccagcgtgtgcagatcatcaagcgtgacgaagagcaaggcggcgtgctgaagctgggtaccgaagtggtcagctctgccgacaacaccatcgcaggcctgttgggtgcatcgccaggcgcgtccaccgcggctccgatcatgctgaccgtgttgcaaaaggtgttcaaggacaaagtagccagcccggcctggcaggaaaaactgcaccagatcgtgccaagctacggcaccaagctgaacgacagccctgaggctgttgccaaggaatgggcctacactgccggtgtgctgcaactgaccccgccacctgcgatcccgcaactggctgctccacaggctaccgaggctgccaagcctgcggctgagccaagcaagccggtttctgacctggcgctgtaagcaacatctacgaaaaagcccgctgaaccggtgacggtcagcgggcttttttgtgggcattcagagggtgaatcccttcttgagttgctcatgcagatgaagcgccagatggtttgcgctatcggacaacaagtagatgtgatggcgcggcaattcaggcagttgaacgccggggatattttgggtcaacccagcggttattcggctttcttcaatcaggccaacggccaatccgcagatcacggcggcttctaccgcagtagaactggcactttccagcaggactcgatagtaggcgccatgctctttcaacgcccgtatcgccgaggctcgataggggcagccggttaattgcactgcgataggtagcggcgcctgttctggtgttttgaattggtcggaaacaacccatacaggctgtatcgaacccaactgttctccctgctccaagggctgagcactgacgatcaatgccaaatcaatctgttcccggctgaacatggtgaacagttcgccactggatctggcttctatttccaactcaagcaagggattgtcagcgataagctgcggcaggaaatcgcgcatgaaagccggcgcataagaatcgggaagccccaggcgaatccttccttgcatgcgctggggggttaaggaggccagtaagcggtcgtggctcttgagaaagtcagtggtttcgctgagtagtttcttgccatacatcgtcagctcaacaccttggttactccggctgaacaggcgttggccgactaagtcttccagcttttgaatctgcgtcgtaacggtcgaagcgctccgatgcacatggctcgctgcttcattgaagcgacggaagcgggcgaccgcatggaaggttcgcagcagatcgatattgagttgcttgctcatgattcctcttttgaggattagtggtgcgggttattcaaatatacaaaatcatgcatgctgattaggctttgggtcaaacaggttcgtatgtgctttcgcgcctgacaataagaaaaaggagcccatatatggatatcaatgagttggtagcgtcatcgctgaaaaacaaccacggatatgacgcccagatctggacgattgaaaatgccgaaaagtacgcatcgacatctaccgatctcaaggatcgagatcgacaggtcagtgaagaaatccttggtttgatgacctcgttgaatttggagggtgtgaaccgagttgacctctgtgcggcaccctgcggcaatggagcattaagtgagattttacgcgccgtggcggatgatttggtcggtctggtaggtcaagaccgtttgcattacgtcgaattggggccagagccgatcaagacgtccgtgctgcttcagcatctgcttgagaacggggtggaagctgcacattacacggcggttgatatcaaccgggcctcacatgacgtaatgcgtcgagcggtggaaccactgctggcagcgcctgagaactttcgttacttggccaccgatttccgcgcgttgtgccgggacgatattgaatgtgggcaagacgtgacattagtcacgatgctggggtttcaggagggaaatgaactgcccgaaacgatcggccaaatcattcgcagaataggtgggacacggacctatgtcttgtcagaaatgcagctgtccatcccggatgatgatgcgcatattcatcgcttttatcggcatcactgcatgactcgcttttctgagctggtgggtttgaagctcggttttgacaaggtcggcagcaatcatgaagtcgtcgtttcagacattgaagttggtgatgactggtatcgcgtagcggcgaccttgcttcctgttctcagtggtcaagatgaaggttatttgttgaccaatgtgtgcttgaagtacacccgcgagcaatttagccgtgtgcgtcaggactacggtggatgtcgcgtcattggtgagtattgcagcggtgacggtagcgttctctaccagttatcggagtaccgaatggatcacggtatagccaattgagagaggacgtcacgatgaaacagcaaagtgagctacccgtattcgcacaaggggctgcacgcctgaagtcagccctgcaagcatcactggttcccgcatcccgatgtaagcatcccggggccctgctcgacacgttgcaacactggagtgacagttatttgcgcagtgatggcccatgcctcacaggtcatcgcagcttagcgaacctggggtacatgaggtcgccactagtaattgcccagcccgagcagctgacggcagtggctcaggtctcggggctgttcaatgagcagggcatcgccgagttgaggcgagcgtgttatcagctggaggcggggtccagcaccagcgactggattatctctaaccgtacccgtgcggcaacgcggtcatcgacacttatccgggagatgatggacagtcgggcgttcctgctggcggtgtcaaaaattgcaggtgtgccgctggttccgcaccctttcttgcgcgcccgttcccaggtcaattacttctacccgccccaggctcagcacgatagggcacagatcggtatgtggcataccgatggaaccagctttgtgctgaacatagtgctgtctgagcccagcgagtacgaaggtggagagttcgtttattttgagggccctgtggagcgctttgatgtcgcaagcctcaatgacaacgtgcgaagctgtggtgtgaaagccagtggcgatgcggtgtatatctacggcagtcgagtgtttcatggcgtgcgcccactcactcaaggccggcgcatgtcgttggtgttgtcgtttcactgtccttacagtcaggcggatgtaaataagttctggcacttggcatctgacgatggcgtgctgcgtaccatcaggccttggttccagctcaagtgtgacctgatacgacccgccagcgagcaatatcggcgtttggggattgaccccatcacgtttggcgaactcgtgccgttgcaattgcagggggcacgatgacggctcgtattggctacacgcggttgttactgctgcaggtcgtctttgtcctgtcttggagttccggctttataggtgccaagttaggcgcgcagagtgctggagccttcaaccttttgttctggcgttttttgttggtttcgttatgcctggcgctgtttttgaacagacggttgctgagggtttcctggcagcagatccgtcatcacgcggttgtcgggttcctgtcgcagttcctgtatttgagttgcctctacgtggcgatccagaacggtctaccgcccgggatcgcggcgatcattgcggcgttgcagccgttgatgaccgcggcattgtcgacgggcatggcgtccgagcgcagtggcggctggcagtggttggggttgatgatcggctttgtcggtgtgtcgattgtgattgccgggcagtatggcggtggcgggcagggtgtcgggctggtcatgtatctcttgcctctggtgtcggcacttgggctgacactggcgactttgtacgagcgtcgctcggtgcaggcccaggacagcgggttggtattgccgctgtttatccagtcgctgttgaccttgataggttttaccgcggccgtgatctacaccgacaccctgagtattccccatgacaccaacgtactgatctcgattgtgtggctgacggtgttctccaccttcctcgcctatttgagcctgtggatgctgctgcgggtgatgactgccacccatgtggcggcgctggtgtacctggagccgccggtgactctggtgtgggccgcgttgatgtttggtgatgtgatccacgcatcgacctacgcgggcattgctgtagtcgtggcggggttggtgctggtgcgcctgaagcgaccgactgtcgcctgtacttcctgaggctgttaggttcagcaacccgacagacaccgcctgttaaaaagtacccagggccaagcaggagcgtggctgaaacaaggggggatttttaccagtgcaggtgctgggcgttcgcgcccgagggttttgtatgttgctacgttatgcagcattggccgccgtggtggtcgccgcttccgggtgtgtacaagagcgtgtggtgcatgagcgcaggccggtacaacacgagtacgttgatgtggtcgcgccgcagccgccaccggtgcaggtgatcgaagtcgagccggcggtgcgcgaaggttatatctggtcacgcggttactggcgttgggaaggcgggcgctatgtggcggtgcacggccattgggagccggtgcgccagggctatcgttatgtacacccgcattgggtgcagcgtaatgatggctaccactggcagatcggcggctgggttcgctgaccaaacctcctcaccctttcctctgtaggagcgagctagccgagccgtttcatccccgctgccttggccgcgttcagatcaaaggtggcggtgtactcgcaccccgccgcgtggccacagcgttcaaccaggcagtcggcaaagtcggctttgcctgcgctgaacttgcgcaatgcctgccagatgatatcggcgtgctcgacggtcagctcccgcgtgtgcaacaaggtttccagcaccattaccacgtcgcctttggccgactggtaacaggactgcaacacccacaccaactccgtaagcgtcaccaggctgacaaagcctggcgaggcggcggtgagcgattcgatcagttgggacgccttggctgattgaaccgggtcgtcctgggtcaggtaacgcaccagcacgttggtatccaggccgatcatccagcggttgctccctgggccgcgatggcgcggttcatgtcttcgatagacacggcatgggcaggcttgcggatcagacccttgaggtccttgacggttttgcttgcggcaatcatggaaaacttgccgtcttccatttcaacgaattccacccggtcgcctgtttccaggcccagggccgtcctgacctggacagggatggtgatttgcccttttgaagtgagtgtggcggtggccatagtgaagatctccatcgagatactccttaccttagggtaaggaatgacagaggacaatatccgttggtccataggtcgctcgctgaggtgggtgagttggaaggaatagtaaaaccctagtccgaactcttgaacctcacacgccgagccatgccccaaacggatacaaactatgaccgaccaccgctagctcattgcaccacgcggtagcacggtacatacgccgcgccgcctggcaacttcatgcggtgctgggccacgaaggccttcagcagctcatccagcggtttcatgatcgccgggtcaccatggatctcatacgggccgttttcctcgatcaggcggatgcccttgtccttgacgttacccgccacgatccccgagaacgcccggcgcaggttggctgccagttcatggggtggcagcgcgtggctcagttgcaggctggccatgttttcatgggtagggtcgaatgggcgctggaagccttcgtcgatcttcagcagccagttgaagtggaacgcgtcgttacgctcgcggcggaactgcttcaccgccttgaggccggtggtcatctggcgggccacttcggccgggtcgtcgatgatgatctggtaatgcttctgcgccgcttcgcccagggtggcaccgacaaacgcgtgcaattgttccaggtaaggcgcggcatgtttgggcccggtaagcaccaccgggaacggcaggtcgcggttgtccgggtgcatgaggatgcccagcaggtacaggaactcctccgccgtgccggcaccgccggggaagatgatgatgccgtgaccgacacgcacaaaggcttccaggcgtttttcgatgtccggcaaaatcaccagttcgttgacgatggggttcggggcttcggcagcgatgatgcctggctcggtcaggcccaggtaacggccattggtgatgcgttgcttggcgtgggaaatggtcgcgcccttcattgggcctttcattacgccggggccgcagccggtgcacacgtcgaggctgcgcaggcccagttcgtgcccgactttcttggtgtatttgtattcttcggtgttgatcgaatggccgccccagcacaccacgatcttcggctccacacccggacgcagcgtacgggcgttgcgcagcaggtggaacacgtagtcggtgatgccttgggagttgctcaggtcgatacgctggctgtccagctcgttctcggtgtagacgatgtcgcgcagggcgctgaacagcatttcgcgggtgctggcaatcatttcgccatcgacgaaggcatcggcgggggcgttgagcagttccaggcgtacgccgcggtcttgctggtgaatacgcacttcaaagtctttgtaggcgtcgaggatggtcttggcgttgtcgatatgcgcgccggtattgagaatcgccagggcgcattggcggaacagggtgtagatgctgccggtaccggcttcgctcagttgctgcacttcacgttgggacagggtttcgaggctgcccttggggctgacggaggcattgatgacttgacgttggggcattctgattccttgaaagcatagccaccgcgcccgcttgggggcgatggcttgagaatggtgagcgccaattaaggtcgcacgagacggttatttacctcaggcgcaaggcccagcgcaaatgccgtccaacaccatcatgccgcagaacttactgaatcagcttccagtttttgtagaaaacccgacgcagggtaaagaccaggccggcaaaccctgcgatcacggcgttgagcaccgagggcagcagggtcgggcgcacaatatcaatgaacaggcagtagcgtttggcgtcgtttttgttgaaggaggcgtgcatcagcgtgtcatcgaagataaacagcgggtcgtcgtgccagtagtgcttgtgcttgcccacctggatatacacgccctcatggtgcggtgccggcgccatgttgtagagcacacggaacatcatgcgcagggggccgaagtggaacgacgtcgagcggttctcgttgaacaccgagacgccgatggttttcacgaacggcagtttcttgcgcagttgcgggatatccagagtggtttcgatcgggcggccgtaccactggaaaaacaacatgccgcgtttcttctcggccatgcgctcgtccaggtagctgatgatttcatccttgcgggccatggcgtcgtcgatcaccttttgcaggtcttcgcgccaggccggtggcaggtcgttcatggtgtagacatgtcggttgcggctgctgagcaggtcgagcagggtgttgaacggtgccagcacccaggtattacggccgttgccgataaaatacttcttgatggtgtcgcggtcgtacaggccgttacgcaggaagtcataaacgccgcagcacaccaccaacagcagaaacaccaggcaactgcgcgggaaacaatagatcaacagcagaacgccgagcacccacgccagggacaccagctttttgccgacagcatttttgctcatgaaacgaggctccaaagccgaaacatattgaaacaatatcgtcatcataggggtttatgaggctcgcaggcgtttttaaatagggtgaaattgtgaagccgctgcacaatttgtaaccgttgccgtgcaggctccggcgttttatggattgaattttgagaacagaagatttgcgactatcgtgacgcttcggtttttcaggcgtcatagaccggtacgattgaagttgaatggccactattggccttcggcaccttggaagaggcagaaatttttatgatcatcaaaccgcgggttcgtggctttatctgtgtgaccgctcaccctgttggctgtgaagcgaacgtcaaagagcagatcgactacgtaaccaaaaacggcgtcatcgaaggcggccctaaaaaggtgctggtcctcggtgcctccaccggctacggcctggccgcgcgcatcagtgctgcgtttggctgcggcgccgacaccctgggcgtgttttttgagaaagaaggcgaagaaggcaagctgagctccgccggctggtacaacagcgcggcgttcgagaagtttgccgtggaaaaaggcctgtacgccaagagcatcaacggcgacgcgttctccgacgagatcaagcgcctgaccatcgagaccatcaagaaagacctgggcaagatcgacttggtggtctacagcctggccgcgccacgccgtaccgacccgcaaggcgtggtgcacaactccaccctcaagccaatcggcaaggccgtgaccctgcgcggtatcaacactgacaagggcgtagtggtagacaccacccttgagcctgcaacccaggaagaaatcgacggcaccgtgaaggtcatgggcggcgaagactggcagctgtggatcgacgccctgcgtgacgccgacgtactggccgaaggcgccaagaccaccgcgttcacctacctcggtgagaagctgacccaggacatctactggaacggctccattggcgaagccaagaaagacctggacaagaaagttttgaccctgcgcgaaaacctcgctgcgctcaagggcgacgcccgcgtgtcggtgctcaaggccgtggtcacccaggccagctcggccatcccgatcatgccgctgtacctgtcgctgctgttcaaggtgatgaaagagcagggcactcacgagggctgcatcgagcaggtctacggcctgttcaaggacagcctgtacggcagtcagccgaaactcgacgccgatggccgcctgcgtgccgacctggccgagttggagccgaaggtccaggacgccgtggccgcgctgtggaatcaggtgaccgacgacaacgtcaacgagatcagcgattttgccggttacaaggctgagttcctgcgcttgttcggctttgaagtcgacggcgtggattacgacgcggatgtgaacccgaccgtcaaaatcaacggcctgatccaggcttaaaacgcggccaataaggtgggaactggcttgccctgatgtcagtcagttaacgcaaatcccttgtgggagcgggcttgcccgcgaaggcggtgtgtcagtcgcagcatctgaggctgtacgaccgctttcgcaggcaagccagctcccacatttgatcttcattgctttgagcattgcgttcgctcaattaggccgtgcctcctcccacctgtcttttcagacacttcttacgccccggcgcgcgcctccctcttgtagatctgtcagactccagctgctatcaagccacgctaacggaggatctgatgacgattcgtgcagtagtttttgatttcggcggtgtcctgttcgactggagcccgcagcacctgtaccgcaagctgatcgccgacgacgtcgagcgccaatggttcctcgacaccatctgtacccaggactggaacaccgagcaagatgccggtcgctccttggctgaggccacccgcaccctgattacccaataccccgaacacaaggccctgatccaggcttattacgagcgctggccagaaatgctgcgtgccgaattacccgagggtgtggcgattctcgaggccttgcaccaagttgagatgccgctgttcgggctcaccaactggtcggcagaaaccttcccttatgcccgggccaactacccgttcctgcagcgttttcgcaacatcgtcgtgtccggcgaattgaaactgatcaagcctgacccggcgatctaccacgccagcctgagtcaagtgcgtgaacacttgccagacatccaggccagtgaagtggtgtttatcgacgacgtcgccggcaatatcgaggccgccatcgcgttgggctggcagggcattcaccacgtatcggccgagcgcaccgcctcgcgtttgcatgagttgggcgtggcgttctagcgcgcccatttctccatcacaaagtcgacgaacgcccgcagcttgggcaggcggtagcggtcctggcgatacatcaggtgcatggggcggctgggcagtttataggtggtcagcaaggccactagcttgccgctgtccaggtccggttgcaccagagcatctgccagcatggtgatgcccatgccgttgatggcggcctggcgcaagccttgggagctgttgatggtcaatgagccagacaccggcacctgcacctcaccttcatcgcccgtcatgcgccacagtttgtcggtgtcgcgccagttgtcgttggcggggtaggcgaatgccaggcagtcatgctgctgcaggtcggccggggtttgcggtgcgccgcgtcgcgccaggtaggcaggggaggcgcaaagggtgagggtgtaggcctgcaggggccgggcgatcaggctggagctttccagttcgccgagacggatcgccacgtcaaaaccgctgtcgaccaggtccatgcgttcattgctcatcaccacgtacaggtcgataagggggtagcgctgggcgaactcactcaaggccggtaccaggcgttcagtgccgaacaccggcggcgcggtgatgcgcaggctgcctttgggggtttcgctgtggacctgctcggccagtagctcggagtcggccaccagccccagcacttccaggcagcgctgataatactgaccgccaaattcggtgaggttctgcttgcgcgtggtgcgtttgagcaggctgacgccaagccgttgttccagagcccgcagatggttgcccaccatggtggtcgagatcccgcattcctgcgcggcggcggtcatgctgccggtttcgacgactttcacatacaccgacattgcctggaacagatccattatcaagccctggtttaaagttattgcaacgattctacgtttatccagcaagggtggttaaccatactggatccaccccaacgatgcactggagcctccaccatgaccgccgcctgcctgatgagcacttatcaacccctggccctgagtttcacccgcggcctgggcacgcgcctgtgggaccaacagggccgcgaatacctggacgccgtggccggcgtggcggtgaccaatgtcggccattcccacccaaggttagtggccgccatcagcgaacaggccggcttgctgctgcacacctccaacctctacagcatcgactggcaacaacaattggcccggcgcctggcccaactgtccgggctggaccgtgcgttcttcaacaattccggcgccgaagccaacgagacggcgctgaaactggcgcgtttgcacggctggaaaaaaggcatcgaacagcccttggtggtggtgatggagaacgcctttcacggccgcacgctgggcaccatggccgccagcgacgggccttcggtgcgcctggggttccagcgcctgcccggcgatttcatcaaggttggctttggcgacatggcggctctggaggcgctcaccgcacagttcggcacgcgcattgcggcggtgttgctggagccgatccagggtgaaagtggtgtgttagtggcgccgtcgggctacctcaaagccctgcgcgagcactgcacgcgccacggctggctgatgatgcttgacgaaatccagaccggcatcgggcgcaccggcacctggtttgccttccagcacgaaggcatcgtgccggacgtgatgacgctggccaaaggcctgggcaatggcgtgcccatcggcgcctgcctggcccgcgccgccgtcgcggagctgttcaccccaggcagccatggcagcacctttggcggcaacccgctggcgtgtcgcgtcgggtgtacggtgctggagattatccaggagcaaggcttgctcgaaaacgctgcacgccaaggcgaacacttgctggcgcgtttgcgcatggagttggaggagcatccccaggtgcgggcgattcgtggcaagggcttgatgatcggcattgagctggccagcccttaccgcgacctggcccaacgggcggcgcaggagcatgggctgttgatcaatgtcacgcggggcaagattattcgcctgttgccgccgctgacgttggagcgcaaggaagtggagatgatcgtacgggccatcacccgcctactggactgaaaaagtgcggaagggggcgatgctcgttcccacgctctgcgtggtaacgcctcctgtgacgctctgcgtcacgccttaagagcggacgcggagcgtccagggcagcattcccacgcggagcgtgggaacgatcagagggaggggccattcagccattcctggttcatggtttcggtatcccccaagtactccaacaaccacgccatggccggcgacagcttgttctgcgcccacgccacacacgacgggctggccggaaatggccggctcaactgcagcgccaccaagtccccgcgctcgatccatggcaatacctgatgggccggtgccatccccacacacaggccatcgcgcaggcaatccagggccgacgcccagttgggcaccaccaggcggcgctggttatccagggtccaggtgtcgcgtttgggcaggttgcgcgaggtgtcggtcatgcacagcgaggcaaaggggcgcagttggtcatcactgagcaaaccttgcaccgccgtcagcgggtgccgggcgctgaccacgcacagccagttcaacaggcccatgtcgcggaagctgaagtggctggccaccggcaccgcgctggtggcgccgatcacgatgtcggtgcgttcatccgccagtgcatcccacacgccgttgtacacctcgtattcgagcagcaattccacttcgggaaactgccgataaaagtcgagcaccaactgccggcagcgctggggtttgacgatggaatccacggccaccttcaactggccgctccagccattggccacctgctggcacaggcgtcgggtgccgagcatttttttcatcacgccgcgggcttcgtcgatgaataaacgcccggcgggggtcagttccacgtcgcgatgccggcgcacaaacagcggcacggccagccattcttcgagctggcgtacggtgtaactgatggccgaggggacgcggtgcagttcctgggcagcggcgctgaagctgccgtgacgggcgacggcgtcgaccacatccagggaatattccgaccacatgggcgctgccttcaaaattattgatgagaatgtccaattattatcgcttcacacagatattgtcagcttcataatgggcgccagtcagcaaatagtttgatggcagtatctacaaggcttcgatgaaaaattcttttggttttacctggtacctggcggggctgagcatgctcggttatctgggcatggacatgtacttgccggcgtttggcgccatgggcgagcagttgaatatcggtgctggcgcggtgggcgccagcttgagtattttccttgcaggctttgcagtggggcagttgctgtgggggccgctctcggaccgcctggggcgcaagcccatcctgctcgcgggcctgagcctgtttgtgctcggctgcctgggcatgttctgggtcgaaaccgcgccgcaactgttggccctgcgctttatgcaagcgattggcgtgtgtgccgccgccgtgagctggcaggcgctggtgattgaccgctacccggccgacaaggcccaccgcgtcttcgccagcattatgccgttgatgtcgctgtctccggccttggcaccgctgttgggtgccatggtgctgaatcactttggctggcaggcgatcttcggcgtgttgctggtggtgtcgttgttgctgctggtgccgacgttgttcctgcgcaacatgcccaagcgttcggagcacaagggcagcccggtgcgcctggggtatgggcaattgctcacctcacgggtgtttaccggcaatgtgatgatctttgccgcctgttcggccagctttttcgcttggctgaccgcctcgccgttcattctcggtggcatgggctacagcccgaatgacatcggcctcagctacgtattgccgaccctggcgtttctcgtcggcggctacagttgccgcagcgccttgcagcgcctgtcgggtaaaaccctgttgccgtggttgctggtcgcctattgcttgagcatggtggcgttgtacctggtggccaccttgagtgtgccgaccctgaccaccttgttgatcccgttctgcctgatggcgctgtgcaacggcgccagctacccgattgtggtggcaaatgcgctgatgccctttgcggaaaattccggcaaggcggcggctctgcaaaataccctgcagttgggcctgtgcttcctggccagcctgttggtgtcgtcgatgatcgagcaaccgctgttgattacggtgattgtgatgctggcgacggcgccgttggcggtattggggtattggctggcacggccgaagggcaattcttccgaactggccagcgcctgagctgacaatgcgatcaaactgtaggagctggcttgcctgcgatagcagtgtatcagtgccagatgggctaactgacaggccgctatcgcaggcaagccagctcccacattttttgcgtatcttcagttagaacgtcacttccatgttcagcgtaggcgttgaggtgcggctgccgcgcccaccgtccaccccgaacttgttatgccagtactcatagcccactcctaaatacaggttcggcttgacgcttttacccggtcgcaccgccaccatcagcgctgtacgcatcagcgcttccgctgcggtatcgcggccatggtaatcctcgcctttctctccgacgtagttaatgaacccctgaaatttcgctgcatggttgccaacctcgaacgggcgcatccacgtcaggttaagcatgtaggtgtcgtcgaaggtgtggttcgactcttgcgcgccagggatgccggtgtggttcttttccttgtagtacatcaggctgaggtccagcacgccgacagtgttgaacttcaacgtagggccaatcaccagggcgcgcttcttggcggaagcgaagttgttgttgcggttggcgtcgaagcccaaggtcagcgcgtaatccttgatcagccccgtgccctgcggcacgtcgaacacgcgtgaggcatacagctgatgccggtacacggcgtacacctcgctgccaccgtggtcggtgcccttgcgcgggtcgctgctgtcggacaggaacacatcgaggttgaggaaattgctgccgtaacggtagccgctggcgtgggtaaagctgtagatgcgcttgctgaagtcgtcggggttgttcgggttggtgaagtgctgcccgtagcgaaacccgacgctgttgttcatccactccaccgcaacagcctccccgccgccgagaagggttagtgcgacggtggcgccctgtagtgcctttttcattctttttgtcctttggcgttctggctcgtgacggccggattgtttttgtaacgccgttggagggtatcttgttcgattgattgtatacaactctatggacatacagtctgaacattgcatacagtgagcgcacaacaaaaacagagaacccctcaccatgactatcccgaaggcgtcaccgcagcggcccgaagatgaaaatctgggcgttgccgccaacatggcttacggcctgcagcatgtgctcaccatgtatggcggcatcgtcgccgtaccgttgatcgtcggccaggccgccgggttgtcgccggcggatatcggcctgctgatcgctgcatcgctgtttgccggtggcctggccacgctgttgcaaaccctgggcctgccgttcttcggctgtcagttgccgctggtgcagggcgtgtcgtttgcaggtgtggcgaccatggtggcgattgtcggcagcgacggtgccggtggcgtaccagcgattctcggcgcggtgatggccgcgtcctttatcggcttgttgatcaccccggtgttctcaaggatcaccaagtttttcccgccgctggtgacgggcattgtgattaccaccatcggcctgaccctgatgccggtagcagcgcgctgggccatgggcggcaacagccgggcggcggattttggcagcatgtccaacatcggcctggccgcgctgaccctggtgctggtgctgctgctgagcaagatcggcagcgcaaccatctctcgcctgtcgatcctgctagccatggtgatcggcacggtgattgcggtgctgctcggcatggcggacttctccggtgtgatgcaggggccgatgttcggcttccctgcgccgttccacttcggcatgcccaccttccatgtggcggcgattatttccatgtgcatcgtggtgatggtgacgctggtggaaacctcggcggacatcctggcggtgggcgagatcatcgataccaaggtcgactccaagcgcctgggcaacggcttgcgtgccgacatgctgtcgagcatgttcgcgccgatcttcggttcgttcacccagagcgcattcgcccagaacgtcggcctggtggcggtgactggggtcaagagccggttcgtagtggctaccggcggggtgttcctggtggtgctcggcctgttgccatttatggggcgggtgatcgcggccgtgcccacctctgtgttgggtggcgccgggattgtgttgttcggcacggtggcggccagcgggattcgcacgctgtccaaggtggattatcgcaacaacatgaacctgatcatcgttgccacgtctatcggcttcggcatgatccccatcgccgcgccgagcttctacgatcagtttccaagctggttcgcgaccatcttccactcgggcatcagctcgtcggcgatcatggcgattctgctgaacctggcgttcaaccacttcaccgccggcaactccgaccagcagtcagtgttcgtggcggggactgagcgtagcttgtgctttcgcgacgtggccgcgttgcgcgatggcgattactaccggggagggaagttgtttgatgcagagggcaaggaaattcccttggtagcagatacctcaaagaaagccgcaaaacccgaaaccactgaggtttaaacaggtaggagcgagcttgctcgcgaaaaacgtcaacgatgacgcgtgcttcctgaataaacgcggcgtctatgagtttttcgcgagcaagaactaggcgtccccgtcgctcctacaaggtattaaagctcgcgtactacccggaacccaatccaatccccgcgcgtttgcgggtagatgttgttgcgattgcccgagcgtgaaaacaccggtgcctcgccccagtcattgccgcgaatctggtaggcctcgcagttgggctccacccaggcactgccatccgttggcgcgccgacgtagttggggtgctcgcaatcagccacccgctcatacacgttgccgtgcatgtcatacatgccaaacgcattcggtgggtagctgcccacgggcgacgaatagctgtagccgtccgccgggccgtaggtgttggcgtgctgggcgatgctgtagcccttgccttcgtcgaacgggaaggggaacgggccggtggtgccggctcgggcagcgtattcacgctgggcttcgctgaccatgtggtaggtgtgcccggtcttcttcgacagccagctcacgtactgcttgatgtcgtccatgtccatgcacaccgccggctgacgtggcccctgggggtagcgcggcttgctggcgatgcattcgcggccggggcggtcgtcgccattggcgatcttgactccggtctggcgcacgtagctgtcccattcgccggcggtgatgtggaagcggctcatggcgaacggcttggcgaaggtcacctcatgcatcgggccttcgtcgggctcgcggcccacttcgtcttccggggtacccatggtgaaggtgccggcgggcagcaccaccatttccgggcagtccttgcagtctttgaagaccttgcccggttgtggggcggcggcatgggccaggccgggcagcagggcgccgcacagggcggtgagtgccagtgcggtgagcggtttgagtcgggatggcgtcatggaggcgtctcgttcaaagggaaaaggggtcataaccgctggctcagcagggtcatgaagcgctggatctcatcggagttgttaagcaggcccggcgaggtgcgaatcaccgggccaacgtcacgctccaccgcgtccaccaccacgcggtttttcatcaggtaggccgcgacggcgtcgctgtcctggttcttgacccggaagaaggtgaaacctgctgacagctcggggctgcgcggggtgaccaattcgatctgcgagtgagccagcagttggtccttgagttcagtgttgagggcatggatacgtgcctgcaccgatgccttgcccagttgcaggtgcaacttgaaggcttcatcggcggcccagcgatgttcgaaggcgtggtagccaccgggcgtcatggtcgtggcgaagtccttgtcttcggagaaggtcggaatcatcggtgtgacgtatttgttttcggtctcgcgggcgcacaccaggccggtgccgcgcgggccgaacatccacttgtgggtgccggcgatgaagaagtcgcagtgcatatcggggaagtcgaggtcttccacgccgaagccgtgcacgccatcgacgatatagagcaggcgatctggctcgtcacggttgcgattgtgttcgtccaccagcttgccgatctcaccgatgggcagtttcacgccgctgccggactgcacccaggtcatgcccagcacgcgggtgttggggcgaatgttgcgctggatgttgcccagcacttcatcggccgagacctgattgggggttttgaacaggcgtattttacgtacctgggtccgctccttgcgcaccctgaaatccaggctgaacgcggtggcgtagtgctcatgcaccgtggtgaggatttcctggtcggcgcgcaccttgatcccaccatagatcatcgccagcccttcggatgtgctgccggtgagggcgatctgcgccggtttggcgttcaggtaacggccggcccactcgcgtacctggccttcacgcttccaggtttcctgcaagtcccagtccatggccaggccggggttacggtcgatctgctggcggtagcgctcgatggcctcgcgcacgggccttgggtgcgaggccactaggaagttggaaaagtgcaggtagctcgggtcctggttgaacagctgtttcaatcccgtccatgggtcgttcgtaacggcggccactgcctgaggcagcaacgcggtgcccagcggcaggctcgcagcaaagacgccggcctgcttgagaaatgtacggcggtcggtcatggacttacttcatggtagttagcgattggccaatggcttggcggatttttgtacctgctcccacacccgcaggaagttgcctccccacagtttggcgatatcggcttcggagtagccgcgttggatcagttcggcggtgacgttgcgcacctcgccgacgttctcccagccctggaggccgccgccgtcgttgaagtccgaggcaataccgacatgatcgatgccgatcttgcgcacggtgtagtcgatggcgtcgcccaggtccttgagggtggccttgggttcttcctcgaggatgccgtacagcgcgctggcgtactggccgaagcgttgctcgggccaggcggcaatgatcgcgtcgccgggcatcagagccatggccagattgggcagtggcggcaggtcgaagcgtgcgcgcagggcgttgagcttgtcctgggtcggctggctcaagggccgcaggtaggcggggaagcccaccacttgcaccacgccgccgctgttcttgatcagttgcagttccttgtcactgaggttgcgcgggatgtccaccgatgcccgtggcgccgagtgggacgccaccatcggcgtacggctcaactgcgcgacttgttccagggccttggtcgacatctgcgacacgtcgatgatcacccccaggtcattgaggcgatgcaccgcttgctggccgataggcgacaggccctcaagggcatcagtggagtcattgaagaacggcagcgggcgcgacgagtcggaccaggcgttattgccgatgtagctgaacccgaacatgcgcatgccgcgtgcggcccacaggtccagctggttcaggtcgttgcccagggggtaggcgttgagcatgctgataaaaatcgcgaacttgccttcgccgtgcaggcgtcgcatatcgtccggggtataggcgatgcccacctggttgggaaagtcacgcaccatgccggagatgatcttgtagcgcacctcctgttcgtggcgggcctcctcgacaaaaccatcggtgggcttgtgcggggcgttggcgccgttccagatttccggccagccgaatatcgtcagcgcggcgcccgacaatcgcccgcgggcagccttggccaggtcgaactggccgctgccatccttgtcggcctcgttgcccgccttgccgaaatccaggggcagggtgatgtggctgtcgaatgacaacaggcgatcctgcatttcattggcctgcttgatcacctccagcgggtagccggcgttgcccttgaaccactgatcccagaccagcaagcccgccccggcgccgatagccagggccagcggcaggccgatatacagcgcctttttcgaacgtgattttgtcattgccatctcagtcagttgaggcctttgctatcagggaagaacgagcgatggcgggggaaatttaggtggcgggggcagggcggtaaatttcgtcgggctgcaaacgttctagctctgatcaagccgtttcctaaggtagccaatgacaatctctcgacgtgggttcatcgcaggcctggcgctgaccggtgcagccgtgcccgcggccttttatgcccatcgcgagttgacacgggaagaagcgtttcccatcacccccggcgaagccacggtcgacctcgccgacacccagggccagcacctggcgaacacactgcggggtgtttggagcctgcgcctggaaggtcgcgatgcgggccttgcgggcctgccgcagcaaggcctggagttgctgctcgacatcgccccccgtggccgtggcctgcgagggtacctggacaccgccgagcaattgcgcgccgacggcgagccgcgctaccgcgtcttgggcgacctactgacgggcgagggcgccgtgctctattggcgcttgatcgaccgtgattccgacggcggcgcgccggcctatgaattcaagatgaccctggatgaagtctgggccgatttcggcaatgccggcagcgccacgctcagcgggcacatcctcgaccttgagcggcccctggcgttgaccgaacgcgacaaccgttttatcgcccacaaacaactgttccccgaagcccgccagcgcatcggcctcaacccgaccttgctggcctggctgatttctcccgaacaccgcctgtttcaccaactctggcacgccacccgcgaccagtggcacaagctctccgaagaaaaacgcgaagccctgcgcggcatcggctggcagcccgggccccgcggccaggagcgcgatgcccgcggcaagcgcaaggaccgcaatggttcgggcatcgacttctttttcatgcaccgccacatgctcggcaccgcacgttccatgcaggacttgccgtcctggccgcaattccccgagccgcaaccgccgttggagcgcgatcgcctgggatttgtgcgctacttcgacaaccacgacggtttcgcgctgccgccctgttggtcggcgccggatgacgccgactacacccagtgggtcagcgatatcaaggcggccgagacctaccacagcaactttcaggtgtgggaatcccagtaccgcgatccgcgctacctggccaagttgagcctgggccaactgggctcggaaatggaactgggcctgcacgattggctgcatatgcgctgggcctcggtgccccgcgacccgtccaacggcgccccggtccccttcgcccgtgaccccgcagactttgccgcgcgttggtatgcgccggagaacgactttctgggcgacccgttttcatcccatgtaaacccggtgttctggcatttccatggctggatagatgaccgcatcgaagactggtttcgcgcccacgagcgcttcaacccaggtgaggtgagccgactggaagtcaacggcgtggcctggttcgcgccaggccgctgggtcgaagtaggcgacccttggctgggaccggacacccacggctgcagcaccacaccggggctgcagcaggggcgctcgatggagatggacccggagatcatgaagctggccctgcgcattactttcggcgccgatgaagagctgctcaaagggttgttcaagcgcgtgccacagcggccatggtatgcacggcatttgaaggtcaagcgcgaggcttagcaggcgtttttaaacctgctcctccccgcgcaattgcgcactcatttcatcgcaactgtgtgcccagtcgctcaaccattgcggcagcggcggcgaggtgtcgtccaagcccagctcgcggataaattcggccgggggcagtgtgcccttggcagagcgaaacagcccgcgcatcaccaccacgccaaccacccgcccattgctgacgaagcggtgctccatcaggttccacttgtggtcccagccgagaatgcgggtgtgcacgtcgaatgcctcgaacagcttcaattcccgacggaacttgccccaggtatcgccgactatcggcatggccttgtggcgcagtgccacgcgaaaggcgccggtgcgcagcacaaaatccatgcgcgccacgtcggccagggtgaaatatcggccattggtgacatgccggttcaggtccaggtccagcggccagacccgcatgcgcaccaccgtggtggccaggccgtgaaccggtttgcgccaggggcggcgcaacagcatgtgcagtaatcgaaaccagagattcataaagacgccagacagttgatcaatggccgcactgtacgggggcggaatcggctaaggtagatgcgtaaatgacttattacatgcgaaaagtgcaagctggagtttttacatgcatgtcaccttgctcctggcggatcagtgttccgctgccagtgccaccctggccatggaaatgctcagtgcggccaatctgtttgctcaaagcccacccttcgaggtgacgctcgcgtctctggacggccacccggtgacggtatggggtgggcaatgcctgcaggtgcacggttcactggcgcagatcgcgcacaccgacctggtgctgattcccgggtttctctttaccctcaaggaagccctgccgacgttcgccgcctacggcgcttggttgcgtgagcagcatggacagggcgccgtgttggcttcgatgtgcacggcggcgttcatgctggccgagacggggttattgcacggcttgcgtgcgacgactcactgggcatttgccgggttcttccggcgtcggtatgcccaggtcggcctggatgaggggcagatcctctgcgaagacaatcgcctgatcacctgcgggggcgctacggcggcgatggacttgatgctgcatctgatccgccgtttcggctcgccggagctggctcatacctgcggcaagtacttgctgatcgatgctgggcgcactgagcagtcggcctacgcgatgtggtcgctgcccaagagccacggtgatgcgcagatcctgcgtgtgcagcattggttggagcagcactttgcgcagtcattggtgatcgacgaggttgcccagcgctttggctttggggtgcgtaatttcaagcggcgcttcaaggaagccacggggtgtacgccgattggttatctgcagagcctgcgtctggagcgtgccaagcagatgcttgagtcgacacggatgacgctcgatagcattacgtatgcggtgggttatgaggacagtaattcgtttaggcggttgtttcagcagcgggtggggatgctgccggcggcgtatcgcaagaagtttctgactgccccgtgatccaaatgtggaagctggcttgcctgcgatgacggcctgccagccgacccatatctacctgaaaccccacgatccaactgtgggagctggcttgcctgcgaagacggcctgacagccaacacatttggacagtgtatatatccactccttcggtaacggccgcctagggttccgccctgacggcggctcactttcgaaaagccggaatgccggcccagacaaaagtaagcaaagcgctcttgccccaccactcggcacctcgcttaggctcggtgtgcccgtaatccgccnnnnnnnnnnnnnnnnnnnnnnnnnnnnnnnnnnnnnnnntcaggaagcacgcgtcatcgttgacgtttttcgcgagcaagctcgctcctacagagggcggatttcagccggccttgagggctttgtgcggcaacgaacacgcctcatccagaaacttcaccaccgtccccatgcacgcctggcgttcttccacatggggcatgtggctggagtcttcaaacagtgcccagcgcacgtccgctatctcatccaggaacggcttgaccaccaacggtgtggcttcgtcatgccggccggaaatcaccagggttggcaccttgatggctgacaggcggccgatcacgttccagtctttcaagctgccgattacgtggaattcggtcgggccgctcatggcgtggtacaccgtcgggtcggcatccacctgggcgaaggtgcgcgccacttcttcgggccacgggttgactcggcacacatgctggtcatagaaaatccgtgaggccgccaggtatgccgggtcttggtaggtgccggcctgctcgtgcttgagcagggtttcatgcacgccttcaggcaacagcttgcgcaggcggttggcttcgctgacccaggtgcgcatgcaggtgggggagttggcagggataaacgcgcgcaggcccttgggttgcaagatcgcgtgttcgctgccgagcatgccgccccaggattgcccgaggatcgcgtagttctcgctgatttgcaggtggtccagcaggttgttcaactcgtcgaggaacaggccgatggtccagaacgacgcgtctttttccggcaagtgcgtggagcggccgttgcccaactggtcgtagtggatgaccgcatggccgctggcggcgacgtctttgaaggcgtcgacgtaatcgtgggtgcaaccagggccgccatggatgatcaccaagggcgtgcggcctgtgctcaggtcacccgtgacgcgataccaggtctgataggcgccaaagggcgcgtagccttcgcgaactttttcgatgaattccatttcgtaccctgctctgaaaaaaaaggatcagggttacgatagtctgaacaaaaagtttaggtaactagcaaaacagataggtttttgcccaaagctcaaccttccagcaagcggtaatgggtggcgcgaaccaccgcctggacacggtttttggcccccagtttgtgcatcgccgaggccaggtgcagggtcaccaccgccagggagcggctcaattgcgtggcgatttcagcggcggttaggccttcagccgcccatttcaggcattcgcgctcgcgcttggtcagccggatgtgcggataagcccgcatctccttgctgaacagcgggtacgccgcttcctggagggcatgggtaatcaggctgaaatcggccagcgtatgttgggcgtccttcaataccgtgcgcgccttgccggtgcgtaagccagtgagcgaggcaaaaccgcccttgggcagatgaatcggcacactgacgccgcaggtgagttggcgttcatgcaggtaggaggaaacgggggcgtggcaggggtcgatgatcttttgcagggccgtctcggtcttggcctcataggaccagacaaacggtgataccgaactcagtgccaggtgttgcaccgggtcgatctggtaaaacccttcgctgcaccataaggcgtgccagtcggccggtgtgttgcgcagttgcaacagcgagggggtgatcagtgtgccattgaggtcgatgggcaccgggctgtagtcatacaccagggcatcgaagcccagttgttgggcaaggataaacgtattgtccatctgttcatccaggctcctgcccggtatgaggcgattattgaaggcggtcagcttggccagcatccgttctgctcccgaattcatttgaatctccacttgctgcaagtagaatgccacgccccggcgaaggactgccaggccaaacctataagaaatactaggttatggacgcacggcatcctcggtagtgttgacctgataaacggccgctacccgccaggccgatacaacacaaggaatgtatgcatgtggcgtgaaattgcccccgaccagcagtacaacgtgcaagtcgacggccataacctcgtggtctacagctttggcgaaggcgatgaggtgctgctgtgtctcaacggcgggccaggcctgccgtgtgactatctgcgtgacgcccatggctggctcaaagcacataacctgcgagtggttgcattcgaccagcttggcacaggcgcatcagccagaccgaccgatgccgcactgtgggaaatccgccgttatgtcgaagaagtcgagaccgtgcgccaggcgctgggcctgggccgcgtgcatttgctcgggcattcctggggcggttggctgggcatcgaatatgccgtgcattatcccggtgcgctcaaaagcctgatcctggaaaacaccgtcggcgacattccccacctgtcccaggaactggagcgcctgcgcggcgccctgggcagcgaaaccgtggccatgatgcaacgccacgaagccatgggcaccctcgaccacccgcagtaccaggccgccatcaccttgctcaactaccgccacgtgtgccggctcgacaaatggccggagccggtcaagcgctccctgggcgactggaacatggggccttacgaaaccatgcaaggccccaacgagttcctctatatcggcaacctcaaggactggaaccgcctcaaggaaatggccgagttcacgatgccgatcctgatcaccaccggccagcacgacgaactcacccccgcctgtgcgatgcgcatgaaacttgcagcaccccatgccgagttgcatgtgttccccaacagcagccatatgccgttttacgaggagccgcaggcgtacttcccggtgctgctggactttctcgctcgccaccgaggctgacgcatgaacctggcgcgctaccgttttgtgttgtcccggcccctgcaattgctgccggtgctgctgggcatcagcctgatcaccttcgtgttggtgcgctcgattcctggcgacccggcgcgcgccttgctgggttcgcgcagcacgccggatgcgctgctgaagatccgcgcccagttcggcctcgaccagcccttgtggctgcaatacttttacttcctgaaaaacctgctcaagggcgacctcggccaatcgctgctgtacaaggtcgacgccctcaaactgatcgtcacccgcatcgagccgaccctggtgctggtgctgggcagcgtggtgctggctttgttgatagcgctgccactggcaacgattgcggcgcgccagcaaggctgttgggcggacaagctgatccgcgtgttcaccacggtcggcctgggcatgccggcgttctggctggggttgatgctgatcctgctgctcagcgtgaaatggggcttgttcccggtgtccggttacgggcgcacctggctggacaaggcgcaccatatgctcttgccctgcctgaccatcgccctggcgctgtcggcggtgctggtgcgtaacctgcgggcaagcatgttgatggagttgcaggcagaccatgtcaccgccgcacgtgcgcgcgggctgcctgaaggcgcagtgtttcgccggcatgtgctgcccaacgcgctagtgccggcggtcaacctgctggcggtcaacatcggttggctgatcagcggcacggtggtcatcgaaagcctgttcgcgattccaggcatcggccagttgttggtacgcggcattttcacccgtgactacatggtggtgcagggcgtggcgatggtgctggcctgtgccacggtggtggtcaacttcctggccgacctggtaaccgtggccctcgacccacgggtgaagatgcaatgagcagtcgccccctgatcgccccgtggcgcttgcgcctgcgctttggttttcgcaatggccggctgaccgccgcatggggtttgttgatcctgttcgcgtggttggccctggcgctgtttgcgccgtgggtcgcgccctacgaccccatcgcgcaggacaccagcatcagtttgctggcccccagccttgcccatccgttgggtacggacaattacggccgggatatcctctcgagggtgatctggggtgcgcgcatcgacctgcagttggcgattatcggggtgatcttcccgttcatcatcggcacctttatcggcgcggtttcgggttacattggcgggcgtttcgacagtgtctgcatgcgcgtgatcgatgtggtgctggcgttcccgttcctggtgctgatgctggcgatcatggccatcctcgggccgggcttgcagagtttttacatcgccatggcgctggtgggttgggtgtcgtacgcacgcctgattcgctcgcagatcctggtgctcaaggaaagcgagtttgccctggccgccaaaagcctgggctttggccatgggcgcattctgttccggcatttgctgcccaatgcgctgtttggctccattgtgttttctatgtctgacgcggtgctggtgctgctcaacggcgccgccgtcagttacctgggcctgggggtgcaaccgccaaccgccgaatgggggacgatggtggccgaggggcaagcctttatcaccaccgcctggtggatctgcaccttcccgggcctggccatcgtgaccttggccatgggcttcagcctgttggccgatggtgttgcgcaggtattgggggagcgctcatgaccctgttgcaggtgcgcgacctcagtgtgatcgccaacaatgccgggcgtgatatcaccttggtggacagggtgtcgttcgacctggccgaaggtgaaatccttggcttggtgggtgagagcggttcgggcaagaccatggcttgtcgtggcctgatgcgtctgttgccgtcgcccaatctgcgcgtgcagggcggcgcggtgcggttggccggccaggacctgctggcgctggatgatgccggtatgcgcgccgtgcgcggcgggcagttgggcatggtgttccagaaccccagcagccacctcgacccgttgatgcgcatcggtgagcagatcgccgagggcatccgcctgcatcaaggcgcgtcgaaaaaagacgcgcgcgtgcaggcgatcgaggtgttgcgtcaggtcgggattcccgacccgcaggcgcgggtcgacaactacccccatgagttttccggtggcatgcgccagcgcgccatgatcgccgtagccctgggctgcaacccgaaggtgctgatcgccgacgagccgaccacggccctggatgtgacggttcaggcgcaaatcctgcggttgttgctcgacctgcgcgaccagcgtggcctgtcgatcatcatgatcacccatgacctgggcgtagtggcgcaaacctgcgatgccatcgccgtgatgtacgccgggcgcctgtgcgagcacggcagcaaatacgagttgctggcccaaccgcaacatccgtacaccgcaggcctgatcgactgccagccggcccacagcagcgggcatgcgtcgttgcgcaccattgctggccagccgccgttgctcgatgcattgcccgacggctgccgcttccacccgcgttgcccacaggccggcgccctgtgtaccgagttgctgccacaaggcgcacgcgtggcctgtcactatccgttgggagggcgtccatgagcctattgcagatcaaggatctggaggtgcgctttgccgcgtccggcagcggcctgctgggcctcaaccgccagtgggtgagggcggtgaacggggtgtccctgaacctcgccgccggtgaaaccctgggtttggtgggcgagtccggcagtggcaagagcaccctgggccgggcaattctgcacctcaacccgatcagcgccgggcaggtgttgttcgacggtgtcgacatggcccatggcagtgccatcgacattgcccggctgcggcatgaaaccgcgatgattttccaggacccctacgccgcgctcaatccacggcacagcattggcgaaaccatcgccgaggtactgcgtgtgcagcgtaaggtggcggcgcagcagattcctgatcgtgtgaatgaattgctcgaactggtcggcttgcgtcctgagctggcttcacgcaagcccggctccctcagtggcggccagtgccagcgcgtgggtatcgcccgggcgctggcggtggagccgcgtctgatcattgccgatgaatgcgtggcggcgctggatgtgtcgatccagggccagatcatcaacctgctgctggaactgcaacaacgcatgaacctggcgatcctgtttatcgcccatgacctggccatcgtgcgacgcctgtgcgaccgcgtggcggtgatgtacctgggcaagatcgtcgaggaaggcccggtggaggcggtgtttaccacgccccgtcacccgtatacggccgcgctgatccaggccatcccggagatcgatccgcatcggccattgcctgcgcagccattgcccggcgaaccgccgagcccgctgaatctgccgacaggctgtgcctttcatccgcgttgccggtatgcgcaagccaagtgttcctcggtattgccccccacccatttcctgcacgagcatcggtacagttgcgtgcgtgaagaccctttgctttgaccctctgccattcattaacaaggagttgtgatatgcactcgcgccacttgaaattgctcgccgccgctaccctcacggcctggtcgctgaccgccggcctggcccaggccgccggtgtgctcaccatcggctgccgtgaagacagcaccactttcgacccgatcaaaagcgcgcaaaaccgcgacacctgggtatttgccaacgtctacgacaccctggtgcgcgtggataacctgggcaccaagatggaaccgggcctggccgaaagctgggacatttccaaggatggcctgacctacaccttcaagctgcgcgaggcgaagttctctgacggctcgccgatcaccgccgccgacgccgcgttcagcctgctgcgcatccgcgacaacaaggcctccttgtggagcgacccgttcagcctgatcaataccgccacggccagcgatgccaagaccttggtggtcaccttgaaaaccccggcggtggccttcctctcgcaactggcgtcgccgacggtgtcgatcctgtcggaaaaagccatgaccaagatgggcgaagacgcctactcggaaaacccggtgacttccggcgcgtttaccgtggacgagtggcgcaagggcgaccgcgtgatcctgaagaaaaacccgaatttctggcaggccggcagtgtgagcctggacggcgtggaatgggtgtcggtgaccgatgacaacacgcgcatgcgcatggtgcagaacaacgaactcgacacggcgattttcgtgccgttctcccgcgtggaagagctgaaaaaagaccagaacgtggtgatccacgccgacccgtctacccgcgaagatcacctgttgatcaaccacgagcacggcctgttggccaagccgcaagtgcgccaggctctggacatggcgatcgacaagcaatcgctggtcaaagccgtcacttacggtcaaggcaccgtggcttattcctacattccaaagggctcgctgtaccactacgccaacaacctgcaacgcccgtacgacccggccgaagccaagaagctgctggccgctgcgggtgcccaggacttgaagctcaactacgtggtcaacgctggcaacgaggccgacgagcagatcgcggtaatcatcaaggaccagttggccaaggtcggcgtgaccgccaacctgcaaaaagtcgacccgacccaaagctggcagatgctggtggacggtgagtacgatatttcggtgatgtactggaccaacgacatcctcgaccccgaccagaaaaccaccttcgtgctgggccacgacaccaaccagaactacatgacccgctacaagaacgaccaggtcaaggccttggtggcggccgcgcggatcgaggcagacccggccaagcgcgagcaaatgtatgtggagttgcagaagctggccaaacaggatgtgaactggattgacctgtactacagcccgtacatcaacatctcacgcaagaacgtaagcaacttcctgcagaacccgttggggcgtttcaccttggaggaagtggtcaaaaactgagtatttgagtacaccacaaagcaatgtgggagctggcttgcctgcgatggcgatggaacattcaccaccgctatcgctggcaagccagctcccacctttgttttgcggtgtgtcagggcttactgcgcatcgaaggcctggccattgatgctggcactgtcgggccccatgaggtacaggtacaccggcatgatctcttccggtgctggcctttccatcgggttttcccctgggtacgcctgggcgcgcatgctggtgcgggtgccgcccgggttgatgctgttggcgcgcactgcggccacgtcttccagctcatcggcgagggtttgcatcagcccctcggtggcgaacttggacacgccgtaggcaccccaataagcacggcccttgcgcccgacgctgctggaggtgaacaccaccgacgcatcctgggacagcttgagcaacggcagcaacgtgctggtcagcataaacatcgcgttgacgttcacatgcatcacccgcatgaagttctcgccggacaactgctcgatgggcgtgcgcgggccgatgatcgaggcgttgtgcaacaggccgtcgaggtggccgaatgccttttcgatcatcgcggccagctcatcgtattgatggggcagggcggtctccaggttgaacgggatcaccaccggctgcgggtggccggcggcttcgatctcgtcatacacctgggccaggttggcttcggtcttgcccagcaacagcacggtagcaccatgggcggcataggtcttcgccgctgccgcgccaatcccgcgaccggcgccggtcaccaggatgatccggcctttgagcagttctggaggggcagaataatcaaacataaatagcctcgacaaatttcaaggtgatacaccacttgaagtggaatccatttcctgtgggagctggcttgcctgcgatggcggactacgtgccgccaaatgtgcaggctggcagaccgctatcgcaggcaagccagctcccacattgatctcagcgttgttgagatattcgaacaatcagcaactgcacagtgcgttatccagcaccttgcgcaattccagcgggtgatccaccaccacatccgcgccccagtggcgtgggttgtcgtccgggtggatatagccataggtgaccgccgccgtgcgcgtaccagcgtcgcggccggattcgatgtcgcgcaggtcatcgcccacgaacagcacgctggccgggtccaggtcgagcattttgcaggccaggatcataggctccgggtcgggcttgctgtttttcacatggtccgggcagatcagcacggccgaacgctcggccaggcccagacgctgcatgatcggttcggcaaagcgcaccggcttgttggtgaccacgccccagatcagcttggctttctcgatgtcttccagcagctcggccatgccgtcgaacagtttgctgtgcaccgcgcagtccttgagatagcgctccaggaattcctggcgcagctcttcaaagcctggggattcaggatccatcgagaaggtcacggcaaccatcgcccgggcaccgccggagatttcatcgcggatgtgctgcgggttgatcggttccaggcctcggtcggcgcgcatggcctggcagatggcgataaagtccggcgcggtatccagcagggtaccgtccatgtcgaagagaaccgctcgcaacttcacaggcttactcctcgcgcagggtctggatcatgtagttgacgtcaacgtcgttggccagcttgtagtgcttggtcagcgggttgtaggtcaggccgatgatgtccttgacggtcagcccggcctggcggctccacgcacccagctcggaagggcggatgaatttcttgaaatcatgggtgccgcgcggcagcagcttcatgatgtattcggcgccgatgatcgcgaacaggtaagccttggggttgcggttgatggtggagaagaacacctggccgccgggcttgaccatacgaaagcacgcacggatcaccgaggacgggtctggcacgtgttcgagcatttccaggcaggtgaccacgtcgaactgctcgggcatttcctcggccagggcttcggcggtgatctggcggtactccacgctcacgccggattcaagctggtgcaactgggctacggccagcggcgcttcgcccatgtcgatgcccatgacggtggcgccgcgctgggccatggcttcgctgagaatgccgccgccgcaaccgacgtccagcaccttcttgccggccaggttgacgcgctcgtcaatccagttgacccgcagtgggttgatgtcgtgcaggggtttgaattcgctctcacggtcccaccagcggtgggccagggcttcaaacttggcgatttcggcgtggtcgacgttgctcatggtgaatcctctgaatctgataagtcggtgtgtcgcggctgaacccaaggcttcagccgcgtcgttattcgctgtgcccgctgatgcgttggccccaggcaatggccgtggcggtcaactgttgttcatccatgcgggtcaattgccggtcgtcgagcaatggtttgccagcgacccaaaggtgtttcacgcaatcgcgcccggtggcatatataagctgtgagaccggatcgtagatcggttgttgcgccagcccggaaagatcaaaggcgacgatgtctgccgccttgccgacttccaacgagccaatctggctgtccaggcccatcgccctggcaccgttgagcgtagccatgcgcaaggctcggtgggcgtccagtgctgtagcggaaccggccacggccttggccagcatcgccgccgtgcgggtttcgccgagcaaatccaggtcattgttgctggcggcgccgtcggtgccgatggccacgttgacgccagcctgccacaagcgctctaccgggcaaaagccgctggccagtttcaggttcgattccgggcaatggattacgctggtgttgctttctaccagtaaagccaggtcgtcttcgctgatttgggtcatgtgcacggcctgaaaacgcgggcccagcaggccaaggcgagccaggcgcgccaatggccgctcgccggtctgctcgacggcttgctgcacttcgaaggcggtttcgtgaacgtgcatatggatcacggcgtccagctcttcggcgattacccggatcttttccaggttggcatcgcacacggtgtagggcgcgtgagggccgaaggtgatcttgatgcgcgggtggtgcttgaggtcgccgaacagctcgataccctggcgaatcgcctcgtcggcactgctggcgccggggatcgggaagtcgaggatcggcaacgcgatctgcgcacgcataccgctgttgtgcacgcagtcactggcgaccttggggtagaaatacatgtccgagaagcaggtgatgccgcccttgatctgctcggcaatggccaggttggtgccgtcgcgcacaaacgcttcatcgacccacttggcttcagctggccagatatgtttttccagccaggtcatcagcggcaaatcgtcggccaggccgcggaacagagtcatggcggcatggccgtgggcattgaccaggccagggctgagcagcataccgggcagttcgcgcacctcgcgcgccgccagcttcaacgccgcgtcccgtggcccgataaaggcaatgcagccatcgcgaatgcccaggccatgctccttgagcaccacgccagcgggctcgacgggtaccagccaggtcggcagcagcaacaagtcgagcggggcggcagtggaggtcatcgcaggcttcttcccaggcagctataaaagaagggcgaagtatacccgagcgccctggctggcggatcgctataatcggcggcttttgttcatgagtgcggggtaagggatgcgcgaccgactgttggctgcagagaaagtgaaggccatccaatggcgtgatggcgcgctgcacctgctcgatcagcgtgttttgccgtcccatgagagctgggtagcctgcgttaccgttgaagcagtggccgacgccattcgcaccatggtggtgcggggtgcaccggccatcggcatctgcgccgcctatggcttggtgctggccgcccgtgagcgcatcgccgagggcggtgactggcaggccgcatgggaagaagactacgccttgctggctcatacccgaccgaccgcatcgaatttgttctgggccttgcagcgcatgcgcgaccgcctggaccgcctcaaacagcacgccgacccgctggtggtgctggaagccgaagccgtggcgatccatgaaagcgaccgggaggccaatgtggtcatggcccagttgggcatggagcggattcgcaagcaccagggcaatgcccaggcgatcctcacccatggcaacgccggcgcgttggcttccggcggcgttggcacagccctcggggtgattcatgcagcgtatctggagggcttggtcgagcaggtctatgtcaatgaaacccgcccctggctgcaaggctcgcgcctgacggcgtgggagttggcgggccagggcatcccggtggcagtgaatgccgactccgccggggcgcatatcctcaagaccaaaggcgtgacgtgggtggtggtcggtgctgactgtatcgcggccaatggcgatgtgatcagcaagatcggcacttatcagctggccgtgtgtgccatgcaccatggcgtgcgctttatggtggtggcgtcgagttcgaccctggatttgatgatggctacgggggaggatgttgcgctggagcagcgcgatagtggcgagttgcttgaggtggatgggcagcggttggatgtcgcggcgtttaaccctgtgtttgatgtgacgcctgccgatctgattgatgtgatcgtgactgaaaagggcgtggtggagcggccggatgtggccaagttggccaagttgatgtgccgtaagcgcctgcattgagtgtgtgggcgcctgtgggggcgctatcgcaggcaagccagctcccacatttaacggtgttcacaaatcaaaggtgggagcgggcttgctcgcgaatggagcttgatgtcaacaaaacgtctgcattccaccctcaaaaaaaagcaccaccgcgcctctgagcccctctcgtccccttcaagcctgtcatccgtcaaattactagcctccatgcgcatcagggggataggtgcgtggcggcgattgtgataacatccggcggtttccagggctgccccgaggggtggcctataacgtgcagatccgtgtcataactcgttgatttgtcgtaagtcgttgtcaggcaccgtgccggcagcggcgagcttcgttcgtcccgaatggatgtgacgaggtttcacccgaaaaaggaatcaggcttctcatgggcgaactggccaaagaaatcctcccggtcaatatcgaagacgagctgaaacagtcctacctcgactacgcgatgagcgtaattgtcggtcgggcactgcctgatgcgcgcgatggcttgaagcccgtgcaccggcgtgtgctgttcgcgatgagcgagctgggtaacgactggaacaagccgtacaagaaatctgcccgtgttgtcggtgacgtgatcggtaagtatcaccctcacggcgacactgcggtgtacgacaccatcgttcggatggcacagccgttttccctgcgctacctgctggtagacggccagggtaacttcggttcggtggacggcgacaacgccgcggccatgcgatacaccgaagtgcgcatgaccaagctggcgcacgagctgctggccgacctgcacaaagaaaccgtggactgggtgccgaactacgacggcaccgaaatgatcccggcggtcatgccaacccgtattcccaacctgctggtcaacggctccagcggtatcgccgtgggcatggccactaacatcccgccgcacaacctcggtgaagtcatcgacggttgcctggcccttatcgacaaccctgagctgaccgtcgatgagctgatgcagtacatccccggcccggacttcccgaccgcggcgatcatcaacggtcgcgccggcatcatcgaagcctaccgcaccggtcgcgggcgcatttacatgcgtgcccgctcgatgatcgaggacatcgacaaggtcggtggccgccagcagatcgtcatcaccgaactcccgtaccagctgaacaaggcgcgcctgatcgagaagatcgccgagctggttaaagagaagaagctggaaggcatcaccgagctgcgcgacgagtccgacaaagacggtatgcgcgtggtaatcgagctgcgccgtggcgaagtgcctgaggtgatcctcaacaacctctacgcccagacccaactgcaaagcgtgtttggtatcaacgtggttgccctgatcgatggccgcccgcgcatcctgaacctcaaggacctgctggaagccttcgtgcgtcaccgtcgcgaagtggttacccgccgtaccgtgttcgaactgcgcaaggcccgcgagcgcggccatatcctggaaggccaggcggttgcgctgtcgaacatcgacccggtgatcgccctgatcaaggcctcgccaaccccgtcggaagccaaggaagcgctgatcagcacgccttgggaatccagcgccgtggtcgcgatggttgagcgcgctggcgccgattcgtgccgcccggagaccctggacccgcaatacggtctgcgtgaaggcaagtacttcctgtcgccagaacaggcccaggccatcctggagctgcgtctgcaccgcctcaccggccttgagcacgagaagctgctggccgagtaccaggagatcctcaaccagatcggcgagttgatccgcatcctcagcagcgccgtgcgcctgatggaagtgatccgcgaagaactggaagtgatccgcgccgaatacggcgacgtgcgccgcaccgaaatcctcgatgcgcgcctggacctgaccctgggtgacatgatcccggaagaagagcgcgtggtgaccatctcccacggcggctatgccaagacccagccattggctgcgtaccaggcccagcgtcgtggcggtaaaggtaaatcggctaccggcgtgaaggatgaggactacatcgctcacctgctggtcgccaacagccacaccacgctgctgctgttctccagcaaaggcaaggtgtactggctcaagacctacgaaatcccggaggcctcccgcgctgcccgtggtcgtccgttggtcaacctgctgccgctggacagtgatgagtacatcaccaccatgctgccggtcgaggaatacaccgaaggtcacttcatcttcatggccaccgccaaaggcaccgtgaagaagaccccgctggaatccttcagccgtcaacgcagcgtgggcttgatcgccctggagctggatgagggcgacgtactgatttctgccgccattaccgatggcgaacgtgaagtcatgctgttctccgatggcggcaaggtcacccgcttcaaggaatccgacgtgcgtgccatgggccgtaccgcccgcggtgtacgcggcatgcgcctgccagaagggcagaagctgatttcgatgctgatcccggaagaaggcagccagatcctcaccgcttccgagcgtggttatggcaagcgcaccgccatcagtgagttcccggagtacaagcgtggcggccagggcgtgatcgccatggtcagcaacgaccgcaacggccgtctggtcggcgcggtgcaggtgctcgacggcgaggagatcatgctgatttccgaccagggcaccctggtgcgtacccgtgtggcggaagtgtcgagcctgggccgtaacacccagggcgtgaccctgatcaagctggccaaggacgaaaaactggtcggcctggagcgtgtgcaggagccttcggaagtcgaaggtgaagagctcgaaggtgaggaatttgaaggcgaggtgatcgcagccggcgatgacaacgttgacgagccaaccctcgacgctgccgcagacgaagaagaaccgcaggaataagcggacacacagggggcggatgaagattcgcccccttgttgtttgtcccgtatgaaatacagcgccctttgcctggacgcggtccatgtgggagctggcttgcctgcgatacaggcgcctcggtcattcagtgataccgcggcgctgcnnnnnnnnnnnnnnnnnnnnnnnnnnnnnnnnnnnnnnnnatgattgcagccccaccagatcagagtgagattggatgtgagcaagagagcctataacttctgtgccggtcccgcggcgcttcctgaagcagtcctgcagcgtgcgcagggtgaactcctcgactggcatggaagaggcctctccgtgatggaaatgagccatcgcagcgatgagttcgtgtccatcgccaacaaggccgagcaggacctgcgcgacttgctgggcatcccatcccattacaaagtgctgttcttgcagggtggtgcgagccagcagttcgcccagatcccgctgaacctgctccccgaaggcggcactgccgactatatcgacaccggtatctgggggcagaaggccattgaagaagcctcgcgctacggccatgtcaacgtggcaggcaccgccaaaccctacgattacttcgccattcccggtcagaacgagtggaagctgtccaaggatgcggcctacgtgcactacgtcgcgaacgaaaccatcggcggcctggaatttgactgggtgcctgaagtcggtgacgtgccactggtgtgcgacatgtcctcggacatcctctcgcgcccgatcgacgtgtccaaatacggcatgatctacgccggcgcgcagaagaacatcggcccgagcggcatcctggtcaatatcatccgtgaagacctgctgggccgcgcccgctcgctgtgcccgaccatgctcaactacaaggtcgcggccgataacggctcgatgtacaacaccccgccggcgttcgcctggtacctgtcgggcctggtgttcgaatggctcaaggagcagggcggcgtggcggccatgggcaagctcaacgaagagaaaaagcgcgtcctgtacgacttcatcgacgccagcggcctgtatagcaacccgatcaacctcaccgaccgctcgtggatgaacgtgccgttccgcctggctgacgaccgtctggacaagccgttcctggccggcgccgacgcgcgcggcctgctgaacctcaagggccaccgctcggtgggcggcatgcgcgcctccatttataacgccgtcgacatccacgccatcaatgcgctggttgcctacatggcagagttcgagaaggaacacggctaatgtctgagcaagaactcaaggccctgcgcgtacgcattgacagcctggacgagaaagtcctggagctgatcagtgagcgtgcgcgctgcgcccaggaagtggcccgggtaaagatggcatccctcgccgaaggcgaagtgccggtgttctaccgcccggagcgtgaagcccaggtgctcaagcgtgtgatggagcgcaacaaggggccgctgggcaacgaagagatggcgcggttgttccgtgaaatcatgtcgtcgtgcctggcgctggagcagccgctgaaagtggcttacctcggccctgaaggcaccttcacccaggcagcggcgatgaagcacttcggccatgcggtgatcagcaagccgatggcggctatcgatgaagtcttccgtgaagtcgcggccggagcggtgaattttggcgtggtgccggtggaaaactccaccgaaggcgcggtcaaccacacgctggacagcttcctcgaacacgacatggtgatctgcggtgaggtggagttgcgtatccaccaccacctgctggtgggtgaaaacaccaagaccgacagcatcagccgtatctattcccacgcccagtccctggcccagtgccgcaagtggctggacgcccattacccgaatgtcgagcgcgtggcggtgtccagcaacgctgaggcggccaagcgggtcaagggtgagtggaattcggcggcgattgccggcgatatggccgcgggcctgtacggcctgacgcgcctggccgaaaaaatcgaagaccgcccggataactccacgcgctttttgatgatcggcagccaggaagtgccgcccactggcgacgacaagacctcgatcatcgtttccatgagcaacaagcccggcgcgctgcatgagctgctggtgccgttccacgataacgggattgacctgacgcgcatcgagactcgtccttcgcgcagcggtaagtggacctacgtgttctttatcgacttcatcggccatcaccgcgacccgctggtcaagggcgtgctggagaagatcagtcaggaagccgtggcactcaaggtgctgggctcttacccgaaagcggttttgtgaggctttgacatgagtggcaacttcctcgccctggcacagccgggcgtgcaacaactctcgccttacgttccaggcaagcctgtggatgagttggcccgcgagttgaatctggacccgtccaagatcgtcaaactggcgagtaacgaaaatccgctgggcccgagccccaaagtgttggcggcgattcgtgaagagctggccgagctgacccgttatcccgacggcaacgggtttgccctcaagtcgctgctggcggacaagtgccgggtcgagttgaaccaagtgaccctgggcaatggctccaacgacatccttgaactggtcggccgtgcctacctggcgccaggtttgaacgcagtgttcagcgagcacgcgttcgcggtctacccgatcgtaacccaggcggtgggggcggatgcacgcgtgattcctgccaaggattgggggcacgacctgccggcgatgctggcggccatcgatgcccagactcgcgtggtgtttatcgccaacccgaacaacccgaccggcacctggtttgacgagcaggcattgaacgaattcctgcaggacgtgccggcacatgtgctggtggtgctggacgaagcctacatcgagtacgccgaaggcagcgacctgcccgacggcctggatttccttgcggcttacccgaacctgctggtgtcgcgtacgttctccaaggcttatggcctggcgtcgttgcgggtcggttatggcttgtccacccccgtggtggccgatgtgctgaaccgcgtgcgccagccgttcaacgtcaacagcctggccctggcggccgcctgtgcggcggtgaaggatgccgaatacctggaagaaggccgtcgcctcaacgaaagcggcatgctgcaattgcaggaaggctttcgtgagctgggcctgggctggattccgtccaagggcaacttcatctgcgtcgacctcggccaagtggccgcgccggtgttccagggcttgctgcgcgagggcgtgattgtgcgcccggtggccaactacggcatgccgaaccacctacgtatcaccatcggtttgccggctgagaacagccgcttccttgaggcgttggccaaggttctggcccgtggttgatgtcactgcattgcaacctgctgtgcctatgatcggtcgcctggtggtggtcggcctggggttgatcggtggctccttcgccaagggcctgcgtgaaagcgggctgtgtggcgaagtcgtaggcgtggacctcgacccgcaatcgcgcacgttggcggtggagttgggggtggtggaccgctgtgaggcggacctggccgtcgcgtgccagggcgcggatgtgatccagctcgccgtgccgatcctggccatggagaaattgctggcggtgctggcgggtatggacctggggcaagcaattcttaccgatgtgggcagcgccaaaggcaacgtggtgcgcgctgcacaacgggcgtttggtggcatgccgccgcgctttgtgccgggccatcccattgctggctccgagcagagcggggtggaggcctccaatgcgcagttgttccgtcggcataaggtcatcctgacgccgcttgcgcaaaccgatcccgcggcgttggcggtggtggatcgtctctggcgcgagctgggcgccgatgtggagcatatgcaggtcgagcgtcacgacgaagtcttggctgccaccagtcacttgccgcacctgctggcatttggcttggtggattcgttggccaagcgcaacgagaacctcgagattttccgttacgcagccggtggttttcgcgatttcacgcggattgccggcagcgatccggtgatgtggcacgacatcttcctcgccaatcgcgaagcggtattgcgcaccctggacaccttccgcagtgacctcgacgccttgcgcgacgcggtggatgcgggagacggccatcaactgctgggcgtgttcacccgtgcgcgggtggcgcgtgaacatttcagcaagatcctcgcacgccgggcctatatggaaacagcagtgaacaccgatgatctgaccttcatcgccagcccgggtggacgcttgagcgggcgcatccgcgtgccgggtgacaagtcgatctctcaccgttcgatcatgttggggtcgttggccgagggcgtgaccgaggtggaaggcttccttgagggtgaagacgccctggcgaccttgcaggcctttcgcgacatgggcgtggtgatcgagggcccgcaccatgggcgcgtgaccattcacggtgtcggcctgcagggcctgaaggcagcgccggggccgatctacgtgggcaattccggcacgtcgatgcgcctgttggccggtgtattggcggcgcagcgcttcgacagcgtgttgaccggcgatgcctcgctgtccaagcgcccgatgaaccgcgtggccaagccgctgcgtgaaatgggcgcgatcatcgaaaccgggccggacgggcgtccgccactgagcattcgtggggggcaatcgctcaaaggcttgaactatgtactgcccatggccagtgcccaggtgaaatcctgcctgttgttggcggggttgtacgctgagggtaaaacctcggtgaccgagcccgcaccgacccgcgaccacaccgagcgcatgctgcgcggctttggttactcggtggcggtgcagggcgcgacggcgtcgctggcgtcggggcatgggttgaccgctacgcgtattgaagtgccgggggatatttcgtcttcggcgtttttcatggtggcggcctcgattgccgagggctccgagctgttgctggagcatgtcggtatcaacccgacccgcaccggagtgatcgacatcctgcggctgatgggcgctgatatcaccctcgaaaaccagcgcgaggtgggtggcgagccggttgcggatatacgtgtacgtgctgccgtgctcaagggcatcgagattccagaggccctggtgccgttggcaattgatgagttccccgtgctgtttattgctgctgcctgcgctcagggccgtactgttttacgcggtgccgaggagcttcgcctcaaggagtccgatcgcatccaagtgatggccgacggtctgttggccctgggcgtgaagtgtgaacccaccccagatgggcttatcattgacggtggaccgatgggcggtggtgaagtgcacgctcatggcgatcatcggattgccatggcgttcagtgtggcttccctgcaggcgacggcgcctattcgtatccttgactgcgccaatgttgcgacgtcttttccgaactttttgacactgtgtgcccaagtcggcatccgtgttgcccaagaggctcaattgtgaatatcaaagcaccggtgattaccatcgacgggcctagcggctcgggcaaaggcacaatcgctggcattctggccaagcgcctgggctggtgcctgctggattctggcgcgctgtaccgtctgctggcgttcgctgcgcacaaccatggtgtggacctgaccaacgaagagttgctgaccaaacttgccgcccatctggatgtgcagttcattgcggcgaccgagggtcagctgcagcgcattattctggaaggtgatgaagtcagtgatgtgattcgcaccgagagtatcggcgcgggtgcctcccaagtggccgcgctgcctgccgtgcgcgaggcgctgctgcagcgccagcgcgcattccaggaagcgccgggcctggtggcggatggccgcgacatgggcacggtggtgtttcccgaggcgccgctgaagattttcctgaccgccagcgccgaggaacgggcacgccgccgttacttgcagttgaagggcaaagtcgatggtgttagtctgtcgagtctgctagatgagatccgtgcacgcgatgagcgtgatacccagcgtgcggtagccccgctcaagccggcggctgacgccatacagctggattccacggagctgtccatcgagcaggtgctggaacgcatcatgagtgaaatcgccattcgcgatatcgccgggtgatcaagaaggccgcaggggaccagtcatagtcctgcggtggcttcttttaactgaaactgacccacaccgtctggggtgtggagatgggcgtattcttcgcccttatcaacaggaattaaaatgagcgaaagctttgcggaactctttgaagaaagcctaaaaaccctgaaccttcaggcaggctccatcatcaccggtgttatcgttgatatcgattaccaagctcgctgggtaaccgttcacgctggtctgaagtctgaagctctgatcccgctggaacagttctacaacgatgctggtgacctgactatcaatgtcggtgacgaagttcacgttgctctggactcggttgaagacggtttcggtgaaaccaagctgtcccgtgaaaaagccaagcgcgctgaatgctggattgttctcgaagcagccttcgcagctgaagaagtggtcaagggcgttatcaacggtaaggttaaaggcggcttcactgtcgacgttaacggcatccgtgcgttcctgccaggttctttggtcgacgttcgtccagtgcgcgacaccacgcacctggaaggcaaagaactggaattcaaagtcatcaagctcgaccagaagcgcaacaacgttgtcgtttcccgtcgcagcgtgctggaagcagagaactccgccgagcgtgaagctctgctggaatccctgcaggaaggccaacaagtcaaaggtatcgtcaagaacctcaccgattacggcgcattcgtcgatctgggtggcgtcgatggcctgctgcacattaccgacatggcttggaagcgtatcaagcatccttccgaaatcgtcaacgttggcgacgagatcgatgtcaaggttctgaagtacgatcgtgagcgtaaccgcgtttccctgggcttgaagcagctgggcgaagatccatgggttgctatcaaagctcgttacccagaaagcacccgcgtgaccgcgcgtgttaccaacctgaccgactacggctgcttcgcagagctggaagaaggcgtggaaggcctggtgcacgtttccgaaatggactggaccaacaagaacatccacccttcgaaagtcgtacaagtcggcgacgaagtggaagttatggttctggacatcgacgaagagcgtcgtcgtatctccctgggcatcaagcagtgcaaatctaacccatgggaagatttctctggccagttcaacaagggcgataaaatctccggcaccatcaagtcgatcaccgatttcggtatcttcattggtctggacggcggcatcgacggcctggttcacctgtccgacatctcctggaacgaagttggcgaagaagctgttcgtcgtttcaagaagggcgacgagctggacaccgttatcctgtcggttgacccagagcgcgagcgcatctccctgggcatcaagcaactggaaagcgatccgttctccgagtacgttcaagagaacgacaaaggcgccatcgttaaaggcactgtgaaagaagttgacgccaaaggcgccatcatcgttctggccgacgatatcgaagcgactctgaaagcctccgaaatcagccgtgaccgcgttgaagacgcgcgcaacgttctgaaagaaggccaggaagtagaagccaagatcatcagcgttgaccgcaagagccgcgtgattcagctctccatcaagtcgaaagacgaagtagaagagaaagaagctatccagagcttgaaagaagctgctccggaagctgctgctgacaccaccatggcggcactgctgcgccaggcaatggccaagcagaactaagttctgtaaagctgtagaaaaagggcgacttcggtcgcccttttttgttgcctgacgcctcaacggtaggagcgagctcgctcgcgaaaaactcacagacgacacgttcattcaagattcatgatcgttcccacgctccgcgtgggaacgcctcttgagacgctctgcgtctcgtccgttagcgccagtggcgcagagcgtcactggctgcattcccacgcagagcatgggaacgatcacgatcaagggccttgcgatgcgaggccttttttttgcctgaaatttgatgaagcaactgcaccgaaccaaggcattcagcccaatgtcagaactgactatagtcataaaaacggctatttcgcgttgctgactcaataagggtttgaatgaacagaattatcgtaatactcgccttgctggtgcttgcaggctgctcctccaccagcgccaagacccacgccaagcgcggcgtcagtggcatcgagatcgactgctctggcctgggcaacaagtgggaaaagtgcgaaaagcgcgccgcccgtgagtgcaagatgcagggctacaaggtcattacccgttccagcgacgccgaggacgaagagggtgactacctgttcggctggaaccctgctggcgcggtgacgcggaccatgttggtgatctgtaagtaagaggttgaccgcccgctgagcgtgtttattcagcctcagataagttgacacatgggctgttcaaattcatcaactcatgctaaaaccttcggagcgcttttcctagctgcttgaaaaagaagggaaaaatatgacgaagtcggagttgatcgaacgaattgtcacccatcaagggctgctctcatccaaggatgtggagctggctatcaagaccatgcttgagcaaatgtcccaatgcctcgccaccggagatcgcatcgaaatccgcggcttcggcagcttctccctgcactaccgcgcaccccgcgtaggccgcaacccaaaaaccggccaatccgtcagcctcgacggcaaattcgttccccacttcaaaccgggcaaggaattgcgcgatcgggtgaacgaagaagaggaagaaggtgtctgagtgtttttggggaaggagaagggtatgcgtggggttaagcgcgttgttgcggtattgattgcagtgctggcagtgctggcagcgttggtggttttggcgtttgtgctggaaaaccagcagggcgtggcgctgtcgttcctggggtggagtactgcgcagatgccggtggcggtgtttgtggtggtggctttgattgcgggaatggtgattgggccggtgttgggggtggttgtgcgtaggcgtcggggtaaggcggtggtttaggggggagtcttagctggcattgtgatggaaatgggcggtgtttgagaccgtttgtcagaaatcttatcatgtcgagcgctttgagttgcctggctacctattcccgctggttgcgacagttctcatggggaattcagaaacgtctgacagacatgtcaagacttgtaatatgccaaagagatggcagaatggaatctgttctcgataacaggcattttgtgcgctcaaaatttggcagagacgctgagttttggcggtcatccaattagaataaaaaatacgcaattttgtctgcataacgagcccgcagtttctctttgaaggcaggtttttgttgtgagtagtagctttcgtatccctcctgtatctcaaaatgacgagatcgatatcgtcgagcttgtgcaatccatttggcagcataaaaagctgattctagcatttgcgctaggtgccggtttgctcgcgactgcctatgcttttatagctacccctgagtactctgtgaatagcgtgttgcgacctgctgcgctcaacgagttggacgcactcaatcgttctgaagtttataagttgccaccagaggccgcattgataaaagtgggggcgtcacttgaatcttacgaagtgcgtttaaatttttttagagaaaaccagaagctgtttgaagcgttcgtgcgcccaggtcggacattagagcagagctttgaagagtttaatcgcaattcaattgttttgaccaggtcggacccgaaaaataatacagcaatagattcgaatataacactgcatcttaattatccggcaggggttgatggcgtcgcgatacttaataactttgtgggttacgctgttgaagctgaacgcttgaaaatcgcttctgatatgcgcgttattgttaaaaatagaataaacgaaattcagggtaaactagaagctgcgcgagcaggctatgataatgataagcaggcaagaatagccttcttgcttgagagtgatagcatgaagcgctcacaattacaggacgagctcagggcgctaaggatacagttaaaggagctgcgagcggatcgaatttcccagctcgaagaatcaattgttattgctagatcattgggtattcataagcctactactccctctttgcttggggagaccgatcgtcctaattcgagcgtaatgaagaccgagataaataatcaacaaataccactgtattttatgggggtagaggcattattggcggagcgttctgctctgcagcgtcgtaccagtgatgactttgctgatggtcggatagcgcaaatatcaaaagagcttcaactattgcgtacgaaccgtgaggtggaagtgttagaaagtcgcgcaaatgaagagctcttcctcagcggcgtccagccattgcgcgcagagatggttcggttgcagaatctgaatatcgacctggacggattgaagcttgtcagcattgataagctggctcttgaaccaactagtcccattaaacccaaacgttttctagtcattgtagttggcgtattgtgcggaatcatcttgggtctggcgattgcggtagtcatgtatttctcaagacgctctaaaataacggtattgaatgaggtcccactcctgaaatagccgtgatcatgaattataccccctgtctgtaatggtggctaaataatggcctttgggctcctcgtttagctgcttgaccgagtcttgctggtgggttgggggcggaaagggcgacggggagagatagatgatttcgttgaatttatcttcgttgcgttggtcgtaagcgtatgaagcacgagcattccgagtggtatcctggattgagcctgtcaggcataatacgcgtatgttggcacacgatacagaagcaccgtgtcaatcatgagcgggtctgggcttgcattaatgaatgcctttaggcatcaagatcggtgttcaggtttaggccaaaggttttaataatgagctcggagtatggatggacagtaatttagtgagtgtattcgaattcatcgtgatttttacattggtaggggcacaggttttcgatgtgtacgctgtcatggttcgagcgaaggttaacgtggatggtactacacaagttttagctgttgctaactggatccagtacctggcacgcattatgaatatggtttctgtattcagcatatctctgttgttagaaagtaagattagcaccattggtgtgcctgcaatgtttggctattcaatgtgccttggactggtaatgatcgggctcgtttgcaagtttagttttaccagtccggtgcttagagttctccagtgtgtagggtttactccggtgtttggtgagcctggaaagaaggcgtattggtggcgtgtaaagtttgattttttttcaaggcttacttggttttctgtattggttagtttgtttataaacttggcgattatcatgccttttatgttaagtgttcgatatccagaggttaggatgacgctggcgtataccggtcaattacttaacttttgtgcgtcaattataatgttcacctatgtggatcgtgtttttttcaaagcgcttgatgccggtaatgagtttgcctgtgctaatagaattatcacgggaaaacttgtagcgcagttcatattggtgctaggtgttttttgtttttattttaccgttgggggttaaggagtgagtgtagaagccgacgccgtagctaagcttgaagagggtggggagcaatcacgctctttttcgggcagttggtatgtctatctcaatctgctttttgtgcttgccctgcttattgtttattatttcatggggggttggtcgtttccggattatccgaattatgtaaccatcgttaataatggtgggtacttgtttagtaaagacgaatatatggctgagtgggtttctcggctgtttttaagtcaggggttacttttttttgacagtgccgatcatgttgtcgacttttttgcgttaattgttcagattttttatgtgttatttgttttctattttggtgtcgttaaaggtggcatatcgaggcggggttggtttttctttaccgccgttttaggccctttattgatcactacggcgctgcgtgcctccccggcatatatattggttgcctatatagcggcaaccggggggaagtttaatttaaagtttatactgctctctattctagccgtttccttccatgattcagcgttgattctggttgctgtgtatgctgctagctgcatagctacatacatgtttaaatcgattgggctggttttttaccaatttttgatgtggtgttctctcacgttgatactgctttcacagcaagtagcttatgttttgttctcagtggtatcaaaattaaatattgggattcggtcggtttactttcaagaacttcctgaaacatcaactgtaaaaaagatttttatggttgtcatttgggtggtggcctataccacgataaaaaatctagcggtgcaagcgaggactaagctgtttgtttgtggctctatgttgctcacagcactttcctttgcgttgagcgaagttgtcggggttcgatttgctttatatgtattgggcagctgcgttttggccaaaggggcttttttatttaccgggcagagtagcagtagatatcgtcagatagacgtcgtatttgcggttgggtatttttgcttggtgtttatggatattcttcgaaatgcgggaggtgcatgatggctaaaattgcggtgctgttggcagcttacaatggtgagccatttattgtttctcaagtcaattcgatcctgtcgcaattggatgttgatgtcgatctttatattcgtgacgacgggtcaacggataagacggccgatgttatccaaagctttgcaagcttgattaatgtaacgattattgaagacgatgctagcactcggtcggccgctggaaacttttttaaaattttgtctcaaattgagatagaaaactatgattatgtagcttttgccgatcaggatgatatctgggatcccgaaaaactaaagcgagcgcacgctaagattgtcgagggggatcatgagggttatagcgccgatttaattgcttattcgaattcaaaaggtcatgcccagtatttaaaaaagtcttatccagctaaagatttcgattatttatttcagggcgcatcggcgggctgtacatatgtaatgacttcaaagttggcagcccttgtggtgcgctacaccgcgaacttacaaagtgcggatttcataggccgctctcatgattggttagtatatgcaattgctcgtgccaaccagatgagttggtgctatgacgcttatgcgcctattttctacaggcagcatgccagtaatgtttatggtgccatgactaccctaggtgggttgttggagaaaatcaagcttgtccgaggggggtggtatcggtctaacgtactatggatagcagaacattgcggtgccggtgatagagagagggatgtaatagagttggttaaaagaaatagctttcttgatcgtctgaaacttatcggtcgcgtcggttcgttcaggcgtaaagcatctgagtgtcgggtgttgagtgcgttctttttcttcggattattttagttatatgaaaagattaatggatatagtgatctctggcctgggtttgcttttattgtctcctgtcatggtagtcacctatttactggtgaggtggtatctcggaggtccggcatttttcaggcaggtgagacctggctttgaagggagacccttcgagatgctaaaattccggacaatgcttgacgcgcatgacgcggcgggtacgccattaccggattctgagcgtttgaccaagttcggacggttccttagggctagcagtcttgatgagcttcctggtttgctaaatgtgctaaaaggggatatgagcattgtcgggccgcggcccttgctgatggcctatctccccctatacagtgcagagcagaatcgcaggcatttggttcgtcccggagtgacgggactcgctcaggtgagcgggcggaacgcgctctcctgggaggaaaaattcaaactggacgtgtggtatgtcgacaaccagtctctactgctggatctgaaaatcattattttgaccttcaagaaggtgttcttgcgagagggcatcaatcaagaagggcaagcaactatggaagccttcaagggttccaacgacaacgaaattgatggggaaaagaaatgagcaacgatattctgaacttgatcgcagaagccaaagaagctgacgaaggctctgttaagctgggcgataaattagattgggattccatcgccgtcgtaacctttatggcttttctctctgagcgagatatcagtgtttctgctgacggtcttaataagtgcgaaaccgtagatgatgtcgtggccttggtcgctgctaaaagtgcatgataagctttaggcttacctaatccataccgctcaaaatacttcacaattttgagcggtttggattttttattttaatgattttatcgaacttgctcggtatagcgttatacaagaattgtagaggggtggggtgtttatgaatgttgaattggactcgagtaaaatcgaaagagatttagttgagtcatactggcaccccctgtgctttaattctgatttgccgaacgatagagattttttacgctttgatgttctggattttgaggttgtaatatttaacgataagggacgtctcattgcgttcgataatcgctgtccacatcgaggaagccggtttttcaccgaggattatggtaaccgcggtgtcgtctgccggtatcatggttggagcttttcggatggccgtttacgaatacccaatgcagcttcgtttgttggatgcgatatagaaaacgcttctctcaatcagttcaaattggcagcctgtggggagctggttttttttgcagttaacccacgtgtctcgctccaggaacagattggtagtgaggtttacggcgttgtcgaacgcttaggtaaggatgtgcaggcctgtaatgattttaatcgttatgagtttgagtgtaattggacgattgcactggaaaatgcacttgagccttaccatataccattaattcatcgcaatacgcttgcgaccttgaagttaggtgttggcgagaatgtgtttgaaggcgagaattctatctggtattcgccggtagaggatgagagagttcagcgccggctttcgggactcagcaagttcttcgaaaccaccgatccatatcaaggttatatgagcatttttcttttcccctttgcgatgatctcgtcgacatatgggtactcctattcgatgcagaactttttcccttctccgaaggtggatcgtgcgtttttcactagtcggctttttccggcgagaacatccgatccgcgttacagcgagatcaccgggctgttttccaagtctaccgctgaattaaatcgtcaggtcttcgaggaagatcaccagatttgtcaaagggtccctagtgattcttggaccatgtctcctccaaaatatttgagctcgttagaacagaaaattgcgcactttcgtcaatcgtgtgcaaagggacgcaaatagtttgctctctgtgttttattgctatcatttaatttgtgtttttcggtaggggtgggtgattatgtcagcgagtaattttgagaatattagagttgtaaataatgttcgagtcgaaggcattgcatgctcgatgccagagaaggtttcagaagtttcagacctcgctgaaaagttcggtgcggaaagtattcaaaaaataatggcaagtacgggtgtcttccgtcgacatgtagtcgacagtgagtgctcatctgatctttgcgttgctgcagctgagcgactgatggcagacctctctgtagatcggtcctctatcgatacattgatattcgtatcccagactcacgatcatacattgcccgccacggcttgcattttgcaagagcgactgcagctttccgtaggcgtggcggcgtttgacgttgctctaggttgctcaggctacgtatacggattatggctagcctcttccttgatatcgggagggggcagccgacgtgttttgttattagttggggacactatcagtaagatcgtatccggcgaagatcgttctgtagccgctctttttggagatgccggctcggcgacgttgcttcaatatgacgaaagtgcccaaccaatgtctttcgcgttaggaactgatggacgtggtgcaaaaaatctcattgtgccggcgggtggttttcgtgatcgtaacggtgaccttagtgaagtcagcgaacccgaggtgcgtggagcgttcgacttgttcatgaacggagcagaaatttttgctttcaccttggcgcgggttccctctttagtaaaagcgcttcacgagagccgttcggatttgggggcaggcattgaccattacgtttttcaccaagctaataaattcatgctcgaacatttagcaaaacgcatgaagttacctcgtgaaaaggtagtactcgatctggaaagtgtaggaaacacgagttgcacatctatacctcttgcactgtcattagctgatcttgaaaaagacaatcggttgacaggcttgatgatgctagcgggatttggtgtgggttattcctgggcgggttgcattgtagactttgataaagtatgggtaagtgagatgtcctacacttgtgctgtgaaggagtcagtatgaatatgccaggttctaatccgttttccttggaaggaaaacatattctggttaccggcgcgtcgtccggaatcggacgtgaggtcgcggtatggctcagtaagcagggtgcccgtattactctggtcgccagggacacacagcgcttagaggaaacacttcaacgcttggatgggagcggtcataccatcgcggtagtggattttctaaatgaacctgatatctccggttggatgaagaaaattgcaaaggaaactgtagcttttgacggcctggttcatgctgcaggtgttcaggcgcccatgcctattcgggcaacaagtctggcgcattgggaaaaaataatatcaacaaacgtaacctcatctttttcgctgatcaaagctttccggcagaaaggtgtctgtcaactgggttcaagtattgtgttgatttcatcggtcatggctaaagtcggtgagcctgcgcttctgggctactgcgcgagtaaaggtgcggtggagtcaatggtccgggctgctgccattgagttggcgcgcgagggcattcgcgttaactgcgtagcgccaggtgttgtcaaaactgaaatggcagagacactcaaggacttggtgggggcggaatcgatggagttgattgagcaaaagcatccgttaggcattggtgctcctgcagatgtcgcctatgcaattaactatttactctctccagcggcccgatgggtaactggtacatctctcgtagtcgatggagggtacctggcatgagtggtaagaaatttttaatagttggggcgggtgggtttgggcgcgaggtatatgtttggttaaaagattggattgaacatagtgagacacccagtgagtaccagattgatgggtttctggacgattcgcctgcggcgctggaacgcttttcggatgcacctttaattatttcctccatagatgactacgtgcatcaggatggcgtatttttggtatgcgctatcgctgatccgacgataaagaaaattgtttcagagaagctcgttgctaagggcgcgcaattcttttctcttgttcaccctacagcgatagtcggtactagagtggtgattgggcagggtgttgtcgtttgcccaaatacaattctgtcaacagatctggaaattggtgattttgtaacgattaactcttgcaccaccatcggacatgatacctctgtgggaagctacagcactatcagtggacattgtgatgttactggtggtgttcaactggcagaaggcgtatttatggggtctcatgcggtaattgtacctaaggtgactgtaggcgcttttgctgttatcggtgcttcatcggtggtcatacgcaaagtagctcctggcgtgacggtttttggtgttcccgcgaaacgaatagctgggtaataaatgaaatttgcaaaaattactgcaatagaatatgagttgcctagtcattcactaagcaacgaagatttggcgcgggaatttccggagtgggatgttccgaaaatttttggtaaaacgggtataaatgatcgccggataacggctgaaaacgaatgtgcgtctgatctgggttttcgagcgtgtgagaaaatctttgactccggcgtcgttgatagatctgatattgattgcctgattctatgcacacagagcccagattatgtactgccgtcaacggcctgcattcttcaacatcgtctagggctacccacggcgtgtgcagcgtttgattataatcaaggttgctcgggatttatttacggcttgggtatggcaaaggggttgatagagactggccaggtcaagaatgtccttctggttaccgctgaaacgtatagtaagtatattcaccccggcgacaagagcgttcgcacgctttttggtgatgcggcggcggcaaccctaatcagagcgacagatgacactgtcgcgattgaccgttttcgttatggtacggatggttctggcgcagaaagtctgatcgttccggtaggaggcgcaaggttcccggcgttgctcaactctaatttggagactcgtcaggacgacagcggtaatatcaggactgacgccaatctttatatgaacggtccagcgattctggagttttcgctgaagcgcgttcctgagttatttgaatctttgttcgatgacaacttcacgttagacatggtagaccactttgtctttcatcaagccaataaatttatgcttgatgcgttaaaaagaaggttaaagctgcctgaagaaaaatttgtcagggagtttgagcactgcggtaatacggtatcttctactatccctattgcgcttaaggaatctcttgagaagggcaacattaaaacgggtgatatcgtagcgtgtgtcggatttggcgtaggcctgtcatgggcggcgtgtacgattcgtttttaaatcagatttgctaggcgttttgcgatcttaattttataggtattggttatgctgaattctccattcgctccttggccgtcttttacaactgaagaggctgatgccgttcgagatgtggtcctctcgaacaaggttaactattggacgggcactgaatgtcgagaatttgaaaaggagttcgcggcttttgctggtactgaatatgcaattgcattagcaaacggtactgtcgcgttggatttggcactaaaggcgttaggtattggtgccggagacgaagtgatcgtcacatcccgcacatttcttgcgtctgtttccagtattgttaacgcaggtgctacgccggtttttgccgatgttgatctggactctcagaatatcactgccgataccatccgtgcggtgatcacttccaagacgcggggcattgtctgtgttcacttggctggatggccttgtgacatggacgaaataatggatttggcgcatgcccatgatctgaaggtgatcgaagactgcgctcaagctcatggcgcgctctacaaaggccgtccagtagggtctatcgggcatgttggggcatggtcattctgccaggataaaattatgaccactggcggcgagggaggtatggtcacgaccaacgaccgtgagctttgggcaagcatgtgggcttacaaggatcatggaaaaagttgggaagctgtttatgagcgcgagcacgcgccaggctttcgttggctgcatgagagtttcggtaccaattggcgcatgctggagatgcaagccgttattggccgaattcaacttcgaaagatgacggagtggcaagctacccgtcaggcgaatgcggcgcttatttggaattgtgctaaatcattacctgcgctcagggtacccgtgctgccagccggtgttcgacatgcggcctataaatgttatgtatttatccgacctgagtttcttcgcgaggagtggtcgcgtgatcgaattcttgctgagatcaattctcgtggtgttccggcgttctccgggtcgtgctccgaggtttatcttgagaaagcgtttgataacacgggatggcgtccggaggttcgtctcgcaaatgcccagcttttaggtgagactagcttaatgtttttagtccacccgacattaaccgcggcacagatagatttgacgtgcaaggtattagccgacgttataaccgaggcaactgattcagtatgaaggccttgtggaccgctggtgtgatgggtgatcggtgttggagcgacagagattgagagggcacatggataacattcgtacacatttgttaagcctttcgcgtcgcaagaagcgaattttgcaggttgtcgcagatactacccttgtctgggtcgctttgtggatggcctttgtagtgcgtttgggtattgatgaaatgatcaaccccgtcaaaatgcatttctggctgttcatatgtgcacccattgtggccattcctttatttgtgcgctttggcatgtatcgtgcggtaatgcgatattttggtaatgatgcgctaattgctattatcaaagctgtcagcctgtcctctctaatcttggcattcgttgtttattggtatagcaatcacgaaaatgtggttcctcggtcaattattttcaactattggtggttgagtctgattatgatcggcggaatgcgacttgccatgcggcagtattttcttggtgactggtttgccgcggtgcagcatgtaccttttactagtcgggataacggtctttcaaaagttgctatctatggtgccggcgcagccggtaatcaactcgtagcagcgctgagaatgggtcgggtaatgcgacctgtggcttttattgatgatgacagtagtatcgctgaccgcgtcatttcaggtttgcaggtgtttaaacccaaacatattcagcaaatgatcgaaatgacaggggctcaagaggtactgttggcaataccgtcgtcatctcggggtcgtcgtcgcgaaattctcgggctgctcgaaggattcccgctgcatgtccgtagcgtacccggctttatggatttggctagcggtcgggtaaaggttgatgacattcaagaagtggacataggtgatttgctcggtcgcgacgccgttcccgctcaggctgaattgcttgagaggtgcatcaaagatcaaagcgttttggtcactggagccggcggttctattggctcagagttatgccgtcagattctcgaattacgtcccacgacccttttgcttttcgagcatagcgagtttaacctttattgcatcttgtccgaattggaacagcgaattagccgtgagtcactctctgtacgtttgcttcctattctaggttccgtacgtaatgaggaaaaactgttagatgtcatgaaaacttggcatgtggataccgtttaccatgcagcagcttacaagcatgttccaatggtagagcacaacattgccgagggggtattgaataatgtgattggcaccctaaatactgctcaggctgcattgcaggcgggtgttcaaaactttgtactcatttcaaccgacaaggctgtgcgacctacgaatgtgatgggtagtacgaaacgattggctgaattgactttgcaagccctcagtcgcgagtctgctcctgtattattcaacgataaattcaatatttctcgagtgaataaaacacgtttcaccatggtgcgctttggtaatgtattaggttcttctggttcggttattccgctttttcacaagcagataaagtcgggaggaccgttgactgttacccatcccaagattactcgctatttcatgaccattcctgaagctgctcaattggttattcaggctggttcaatggggcagggcggagatgtttttgtattagacatgggggagccggtaaaaattgttgagttggctgagaaaatgattcatttgtctgggctaagtgttcgttctgaaaaaaatcctcatggcgatattgcgatagaatttactggacttcgccctggagaaaaactatatgaggagttactaataggcgataacgtcgtggcaacacagcaccctatgatcatgagcgcgaacgaggattttatttcttgggacgctctaaggttaaaattagccgatcttctctcggcggtcgacgaagatgattatggtcgagtccgtcaattgctgcgtgatacggtcagcggctatgctcctgacggtgagattgttgattggatttatcagcaacgtcggcttgagccttgatctaaaactcatacaaaggcgagagggaactggcctttgtatgtgttaattcagatatattgctgcagattgcctagttttttgctgccaccttaatctctgtccctctcaaagagttttcaagattcttgcgggaatgccagcggcaacagagtaaggtggtacgtctttcgtgactacagctcccgcacctataactgaacccttgccgacggtcacgcctttcaggatggctactttttcccctatccaaacatcgtcctcaattaccaccggtgcataaacaagtttcctctgattggggtgtattaacagctcttcttttgttatctccccatggtcatggtcggtgatataaacttggctggcgatgagtacgttgttaccaatagttatcgagtcaagcgctgcgatatggcaggcgtcgtttatttcaacatgactacctatggtgagtgttttttttccttctttaccattggctgcttctattcgacagtattgccccgttgtaaagccgacaccaattgacatatttccccaacctcttattcgagtgggctgtctgatgattcgggcgggactataaaatatttttgtagttgtaaaagaccaagctagtctaaagaaatcaagtgttgaatactttgatctcatgctgggttccatggaactctccgtttccagtttttttttggttgtatttttggtgttggcgacgcgattatacccaaatgatgaagcggttgaaagaaagataattttttgtgcaatgtttatgcgcgtggtggctctgccgttcgagagctttaagtattttgtgtgctgttattttttgttggtttgtttttgttgcgtttttcctatgcgtactttattggatttcagcgtgtgatctttaacccgcttaagaaaatttaagcatcgtaggttagctttgctcacactttgtaacttactagtttttgactaacttctatcatcgcctaacgtaaaaaagcagcttcggaaaagctgcttttctctcataccgatgtcatggagcgtcaccaatgcaaaacctctacatctcatccctcatcttcgccttcctcaccagcctctccgtcgccaccaccgctgcgccgtccatcaagccagaacccccaaccccgatctccacccaaatgaccaggaccgagcaatccaccaaggtcaacctcaacgctgccgacgccgaaaccctgcgtcgcgatctgttcggcattggtgcttccaaggcgaaggcaatcatcgcctatcgcgagagcaacggcccgttcacagcggtggatgagttactggaagtgaaaggcatcggcaaggcattgctggaaaagaatcgcgacaggctggttattaattgaggatctgaaaacagcgcggagggccggtcatacaccggcccttcctttaactaacggaccttgcgatttcctccctgacgcagcattggcacgaaacgtggttacctcttcctcagtgattgttcaacaatctcgaggtaacgatgccactcaccctatccttagccgaccagatcgctctggaactgcgcgccgacatcataggcggccggctgttaccaggcatgccgctgatcgagtcggacctggtcaaggtctacaacgcatcccgcaatacgattcgcgaggcgctgcatcgtctgggccaggagggccttactcgctatatccgcaacaagggcgtcatggttcggcgcttggagcgagcagaagtacgcgacctcttcgtagtccgccgcaccctggaattgcaggccatagcccaaagtggcccgttgacggacgctcaatcaacacttatgcaaaacgccattgacgccaccaccctggcccgggagcgggaagattggcgagccgtggccactcacagtcttatgtttcaccagcagatcgtcgcgttgatgggcagcccgttgttcgacgagttcttcgcccaggtaatagcccaactgcgtctggcgttctgcgccgcgccggatgagcagcgcttccagtcaccctggctggagcgtgaccatgagatatacacattgctaacccgcaaccaaacccaggccgccagcgaggcgatgagtctgtacctggatgactcggaacgcctttctctcgccttgtttgatcgcccttgatggaggagtgccccatgtacaaagactatcccgccgcgtaccaggtcagcaaaggttcggcgttgcaggtggatacggcgttctatgagcgtattcgtgatcagaaaacccagcgcacgttgatcgaacagttcgaggtgccgattcgaacggggagagcgtggaaggtgccggccgggcatgtgttccgtgtgaccacaccggtggggccgcaggtgggggattttaatgtctggaacgccaacgacccacgcgaacgcttgtgggccgcgcgcactcggcagctgcaaggcgcccatgtcagcacccatgatcggttgtggtcgaacctgccttttctacggcccttggtcactattaccgatgacagcctggccagctacggcattgatgagcacggtgggcgtttgcacgatttgttgggcacgcggtgcgacccctatgtgaaccgtatgttgaccggggaggactttcaccaccattgccactcgaacctgacccgtgcggtattgccccatggactgacggagttcgatgtgcatgacgtgttgaatattttccagtgcaccgggctcaatcaggatgacatgtacttcatgaaagcctgtccggcgaagaagggcgattacctggagttttttgccgagattgatctgctctgtgcgttgtcgacgtgccctggcggggatttgtcgctaccgatgtgggggccggatgcgcaggatccgctgacggtgtgccgtccgttgggggtggagatctaccggttggaggatgagttgctcaatggctggagccagccggaacgtgctgcctacaaagggcagcacggcttgcatattgccaaggcggattgggagtaacccaatattcagcgatcctgcgcatccttggcatctgcctgggcattgcgctcggctacgcgtttgcgttgttcgtcggtgagttccaccttgttggcgctgtcacgcagcatcatcaggccaccgacgatcgacccgatcgctactaccataatcaaccatgcataccacggcataagacgctccttgaggcagaggttcgtgggagaatttcccacggtaatcactgctttgagtgacgggctttctgagtagttcagtgtaggcccgttctgcctcatagacgctattgtccggtcaacattgcatccgccggcgcatcgatgcggtcttgtgcggtcatctggaagtagatgaaacccaccgccataaagcccaggaagatcagcccgatcaaggcattgaaccaggccatcgccaccaggcacaccagcgccagtaccaatgcgataccgggcacgatggggtagcccggcgcgcggaaggtgcgttccagcagtggctcggtcttacgcagtttgaacaggctgagcatgctcatgatgtacatgacaatggcgccgaacaccgccatggtgatcatcgcggcggtcagggtcatgccgcccaggttgatcaggccgtcgctgtagatggcggcgatacccaccacgccgccggcgaggatggcccggtgcggcgtctggaagcgtgagagtttggccaggaaggacggcaggtaaccggcgcgggccagggcgaagaactggcgcgagtagccgaggatgatgccgtggaagctcgccaccaggccgaacaggccaatccataccagcatgtgcagccagccggagctgtcgcccaccacggttttcatcgcctggggtaatgggtcgttgatgttcgagagggtgcgccagtcacccacgccgccggcgaagaacatcacgcccatggccaggatcaccagggtgaggatgccgctgatgtaggccttcggaatggtgcgtttggggtccttggcttcttcggcggccatggccgcgccttcgatggcgaggaagaaccagatggcgaaggggatggcggcgaacatcccggcaatcgccggggcgccgaaggtgtcggaaccggcccaaccattgagggcaaaattgctgaagctgaacgccggggcgactacgcccataaataccagtagttcggcgacggcgagtacgcacaccaccagttcaaaggtagcggccagtttgacgccgaggatgttcaggcccatgaacacgatataggcgccgacagcggcgtgcttggggtcgagtgccgggaattgcacgttcaggtacgcaccaatggccagggcaatcgcgggcggggcgaagacgaattcgatcaaggtggccaggcctgcaatcaagccacctttctcaccaaaggcgcgacggctgtaggcaaaggggcctccggcatggggaatcgcagtggtcagttcggtgaagctgaagataaagcaggtgtacatcgcggcgaccatcaatgaggtcaccagaaagcccaaggtcccggcgacgccccagccatagctccagccgaaatactcgccggagatcaccagcccgacggcgatgccccataggtgcagggtgcccaaggtgggtttgagttgtgtgttcattttgctgcgctccctgaaccgttcggaaatggttcagcgtgttgcagcaggcgtgccatgccatggcgctacgtcgtaaagcggcgtcagtgtcgcttggaggatggttttgtggttgaagttttccgaagcgcaccagatgggggcggcggcctggtcggttcatccgtcatgacctgacgctggtgcatgcgttggtccacgacatggttgcagtcaatgggctgtttgaggcggtctatttacgccaacttacgattaatggtcgatctggtcggaaccgttcaatgctcagttttcactatgcggtgcccattcaggaagagtgttacacaaataatcgtcagggacgcatgggctactacatctgagaaacccaaaatgacttcagctatgactgctcttcatgcgcgccgggatctgcccccctcgcagaacgttctattgcccgaggccaatacccgatcgccggcaaatgagccatcaacgattcctaacgtagagggcattgcccccatcagcgtgaccccggccggcttgaaaaacgatcggcaagtaagcgaaaaacaccttcagctgcttcatcagtttcgggcgctgaatcagcaagtccaggcattgatgggccagcagccgacactttcgagcgtcatcgagcagcaactcgccgcggcgctctacaaacagacgccgctggacgttactaaactctattttcatcgctaccacactgatgagctggggcagcgcacattgctctctgtagagcctgccactgaggcactctttaacgcgctcaagacgtccaaggggggcggtggctcgcacgcctctacgggccccgccaccaccgattccggtttttatctgggcggcgcgccggccgaacgcaataaacagctggacgttgccgctagcctgctgtcgattgcccaaaccatcgaaaaagaactgccctcgagtcttgcgcgattttggacggagccacgccctggcgaagcgaaccctgaggcacggcaaggcgagttactgcgtattcaacggcagatgttgtctatccttgcagcgcttcaggtagaagagggcacgatgctcccggccgccaagacgctgatcgacaaagcgattgagtaccccactctggaggcgcgggaaaatgccatgccggatggagagcggcctggggtgtatccgctcaagcttgatacgccaaagcccgacggtacgttgatggcaggtgccttcctgatcaccagtggtgatggttcgtcgacacagcgtccgttcaatcgctcggacactaacagggcactaccacccagcgagcaacgcggcctgacggtgctgtataccccccgcgatggctacgaggtgttcgacagcccggccaaagcccagcaagccttgcgccagcgcctcagcaacaacgcctatgccgcgcaacaggccaagcagagtttgcccatttcggtcgagcaaagcctcaagcctggttgggaaaacgagctgagccaaacccttgttccacttaccaccgacgtcattgccgcaggcgtaccgcaattgctcgaacgccagcagcagcaggtaaacaccgagctgcaagcgctattggacgacgatagcggtatagggaaaacggacctctggcaacgatcgcaaacactcaaggacttggatcaggcgtctgccctggcgccacatttcagcgccgacaacgtccttcgagcacgtaatgaatggctgctggagcgtttgagcgagttggacaatcgccaagtgatgcagcaacggatggcggaccgcagcaactggcagtacttggcacagcagcttaaccaggccggccaggcgctaccggaaaatgccacgccgcaggatatatcggccatcttgaaaagtacgccgatgaggattgccccagactctgctcattaccagtcatctatccgcgaaccgggcaagtcgatcagtctggaggcattcatcatcgaaaatgacttgcctctgcccaagaccctggaagagttgttttccctggcacaaacggcagttgcaagggcccagcgacacccgttgggcaatttcgggggcggtctgtcctggccgattcctatgagtgcccgcgagcagcagacggtgcgggccgttgcacgtgaccagatggccagtactcagatggggctactggactacctcaacaagtgccaaccgctctccgaggaagtattgcaggatccggtgaagacgctggaggcactcgtgggctccccgcaagggcatgccatgggattagagatgcaaaccaacttaggtggcgtctccacagacatcagcgtcaatgactatacgctggcgctccttaacctggcactggacccggagtctctcacaaggccgcatcgaaattgggtagccggtttcgacctgaccgacaagaaatactggggcaaacccctctcggccgtcatcgaaggcctgagccagcacctcattgaaaccggccgagcatcaccggcgatggcgaaggcgggggcgtacctgttgctgatgcgggcagccccgcaattactggtgaaggatattcctgacggcgtggtgtacggcagcctggcgtgggcaaacctgtgcattgccgttgctgccattgaagcccagtctccaggcagcgctgccaatatgacctttgccgaggtgatgatcgcagccgacacccgagcgcctgctcccgaatccgcgcaaacaggggtactgctcaattgggccgtagcccataacattctggaactcaagcaagacttgctttacacccaggacgacatcaacaaggcgaaagaggccttcaaccatcagcaaatagaactgcaaaaagcctccacgttattggacacacccttgccaaaccgtcgagagatggctttggaattactcagaaaaacctttggcgacaacgtttcatttgaggaaccaaaattcgtcgaacccgactccgtttcagtctcccttagcgattcgtcttatgttcctccaacttcttattctatgcttgatgccgtcatggaaggggtgagcctgaatgaacgctggaaaaacattatcgaggacgatggtattgatcttgccacgtttatcgcgttcactaaacgcccggaatgcaatattaagaacgcctttgatgaggccttttcaacggtaacggctaagcataagaccgtccaaaaattatcgattgtcaatgctttgacaaatcttcctcccgaggacaaggagaaactcatttttggcgaaatccaatattatcaagagaaaagctataaaattggagtcgtcaaagatacgctgtttcataccagtaaaaagataatagtaacggcaaaatataaaggcattaccagtaactacgaattcgacacggaaaagggtctgatcaaaaaactgagtgacactccggttccgcgcaagcctgagtatattcagaacgaagtttctaaagtcgaggagttcttccccgctcaagagttaagcaaacagattgatggtttgaatacagtttcaaaatttctcccgcttggcgtattagcagagcagggggatgatgccaagcgacaccccttggatgaggcaaggccgtccaccccgtctgtaccgtatctgttcctcgacgagcgggctaaccacatcgccgactcggttgtgaaagcattgaaccttgatgatcctgccattcgaaaagaggcgatgggcatgacgtccgtcgaaaaggataaagaggaggggaaagcggtgatgaactttcttctcgaccttattccttttcgctcggcaatcgtcaactttatagacgggaactacagtgagggaatcacagatgtcgcctttgacctgctgggctttatcaccgcgggaatcggggccgccgccaaagcggcgaaagtgctggctaaaacggggaaggcgctgcagaaaggattaaaagtcaccaagataatgggggcggccgtgttaggtgagctcaacccgcttagtggcgttggcgatttgattaagggcgggggcaaagtgattactcaaggcgtcagccacgtcagagacaccctgcgctctttcaaaagcacgttaagctcgccggagttgatcaacctcagtaagcgttatgacgcggtggccaacggtacattcaaggtgggcgagcagaccctacacggacctgcggtctttcagaatggtaaatgggggctctatgaccctatcagcggccgcccctatggtaccgcgaaggatttcaagcccgagcaaggtgcaatcaaaggggaaatcaaagggttctctgattatctgtcgtgggaaagaatagcaaacacgttggcgcctcctgtgccgcccaatattaactttcgcactgactacgctaacgctatagccgaggcaaagagtaaagatctctccacgtattcaagggggtggagagagttaaacccgcaagccgtctacggctactctccagcgatgaccatcgaacagttaaaacgtcttgccgtcgcccagcctcgtacgccggctcaactcggcagcctggcaaaacgaatagaggacctggaagccctgcccgataagttcaaaatagcccatatcaatgcggccatcagtgataaaaaaggctatgcgaaagggtatcgctcagcgcggccggacgggttggacgagttgacggaaaagttgactctcaatcaggtcgcagagctggctctcgtacccgaacgcacatccgaacaaatgggttacctggtcaggcatatggaaaaaataagagaacaggcgagcaagcgaaactctaaacgtttcagcgaagacatcggctttaaagatgcccgcccgcctattgtgatcaatggtattcctcaggggttatacctcagccgcgttgatttgttgtcggagggtgagtgtgcggcgctgtctacgctgatggcggaagccctcaaacagggcaaacacgacatctttcttgaaaatctaagccaagcgatgcgccccgtgcctacgcgccatgagattgcagagttgcgaaaactggacccggctaaagccgatgccgaacagctgcgcggcactcaagtcgaaaacttccgtagtaagctgagccggcttcaggagaaagtcggagctaaatatcaccaatctagtgaacttaaacaggttccctacaccgatatcatttccgatttggccagtagcagcgaaaccaaaaccttgttaatcagcagccctgaccatggtttgatggcccgtgtggtagttgatccgaatggtaacaagacatggttctattttgaccctaaccacggtcttgcgatattcaccgacgaggcgcagatgaaagctgccctggaaatgaccttgagaaaaggccagagcaaggcaacgctgtcgcacttcgagggtaggtcgggcttacctgagtaccaagtgtcggtacttaaagattcgcaggtaaatcccaacatcgcctcggtgccaggggggattttcgacttgttcacacctctgtaaatcacacagtgggtcaaaaggtggcagtgcaatgctcgatgtgctctcgatcattaatctggcaccttgggtgattgcccgataaggcccctgtaaaccccgcataaacccactctttacgccatctttacgccccacccaagccctcgctctcgttcctttacaccgctcctgcggacaatgcccccacacgcggcaatcgccgcacgaaggggagacttccatgagcgttctggacggagtgtcactgctattggccgtggcgctgttcatttatctgctggttgcgctgttacgcgcggatcggaactaggagcgggctatgcacagttatgactattggctgatcatcgccttcttcgccgtggtactggtgccggcaccgtttctggggcggttctactacaaggtgatggaaggccagcgcacctggctcacgcccgtattggggcctgttgaaaaggcctgttaccgcctctcgggcgtggatgcgcagcaagagcagagctggcagaaatacatgctggccttgctcgcattcaacctggcgggcttcttgttgttgttctcgatcctgttattccagggctccctgccactgaacccgcaaaaactgccgggccaggaatggaccctggcgttcaacaccgccgtcagtttcatgaccaacaccaactggcagaactacagcggcgaggcgtccttgagttacctgagccagatggccggcctcacggtgcagaactttgtcagtgcggcgaccggtctcgcggtcctggtcgctttatgccgtgggatagggcgcaaatctgcccagaccctgggcaacttctgggtcgacatgacccgcgccaccctctacggcctgctgccgttgtgcctggtgctcgcgctgtttctggtatggcagggcgtgccgcaaaccttcgcccactatgtggatgccgtcaccctgcagggcgtggaccaggtgattcccctggggccggccgccagccagattgcgatcaagcaactgggcaccaacggcggtggcttcttcggtgtgaactcggcgcatccgttcgaagacccgacggcctgggccaacctgtttgaagtggcctcgatcattctgatcccggtggcgttggtgtttaccttcggccattacgtcaaggacctgcgccagagccgggcgatcctcgcgtgcatgctggcgctgttcttgatcggcggcgcgacgtcgctgtggtccgagtaccagcccaatccaaccctgaacaacccggcggtggagcaaaccgcaccgctggaaggcaaggaaacacgtttcggcaccaccggtaccgtgctgtggtcggtgaccactactgcggcctccaacggttcggtcaacggtatgcaggacagcctcagcccgctgagtgggatggtggcgctggtcaacatgatggtcggcgaagtgatcttcggcggtgtcggtgccggtatgtacggcatgttgctcaacgtgttgatcgcagtgttcctcgccggcttgatgatcggccgcaccccggaatacctgggcaagaagctgcaagccaaggaagtgcaattgctggtggtgaccctgctggtgatgccggtcggcgtattggtgttgagtgccatcgctgccagcttgcccggcccggcgggcgccatcagtaaccctggcccccatgggttcagccagttgctctacgcgtacacctcggccagtgccaacaacggttcggcgtttgctggcctcggcgccaacaccccgttccataacctgatgctcggcctgggcatgctgatcggccgtttcggctacatcctcccggtactggccctggccggcagcctggcgatgaagaaagccgcaccgattggccagaacagcttccccacccatggtgcgctgttcgtcaccctgttgaccgtgaccattttgctggtgggcggcctgactttcctgccgacgctggcgttgggtcccatcgctgaacacttgagcatgggcttctagttaagggatatgaaaatgaatatgcctgcaaaaaacgcggccccggtcaaaacccaggagcctgccaaaaccgcaatctctgcgctgtggcgcccagcgctggttcaggcgttcgtcaagctggaccctcgccaactgcaacgctcgccggtgatgctggtggtcgaactgaccgccatcctcaccaccgtgctgtgctttgtgcccgataccaccgttccaacgtttgtcgccgtgcaaatagccgtgtggctgtggttcaccgtgctgtttgccaacttcgccgaagccttggccgaggggcgtggcaaggcccgtgccgatagcctcaaggctggcagcgaaggcttgagcgcacatcgccaggaagccgatggcagcttcaaaatgataccggccaccagcctgcgtaagggcgatgtggtacgtgttgccgccggggaaatgatccccggtgacggcgaggtcgtcgaagggattgcggcggtcaacgaagcggcgattaccggcgaatccgccccggtgatccgcgagtccggcggcgaccgttcggccgtcaccggcaacacgcggctggtgtcggactggctgctcatccgcatcaccgccaacccgggcgagtccaccctggaccgcatgatcgcgctggtggaaggcgctaaacgccagaaaacccccaacgaagtcgcgctggatatcctgctgatcggcctgaccctgatcttcctgctggtggtggtgaccttgcagccgttcgcccacttcgctaatggcagcttgcctttggtgttcctggtcgcactgctggtgacgctgattcctaccaccattggtggcttgttgtcggccattggcattgccggcatggaccgcctggtgcgtctcaacgtgatcgccaagtctggccgcgcggtagaagcggcgggggatgtgcacgtgctgttgctggacaagaccggcaccatcaccttcggcaaccgtcgttgctcggccgtggtcgcggcgcctggcgtcagcggccgcgagttggccgaaggcgcgctgctggcgtccctggctgatgacacggcggaaggcaagtccatcgttgaatacctgcgcgccttgcacccgcaggccgagccaagcctggaggcgttgaccgccgtgcccttcagcgccgagacccgtttgtccggtgtcgactaccagggccgtgtgttccgtaaaggagcggtggattcgctgctggcgtttatcggccagcaacgcagcgacctgttgccggcgctgtcgcgggaaatcgacaagatcgcccaaagcggcggcacgcccttgctggtgtgcgccgatggcaagttgctgggggcgatccatctcaaggacgtggtcaagcccggtattcgcgagcgttttgccgagctgcgcaagctggggattcgcaccgtgatggtcaccggcgacaacccgctgaccgccgccgcgattgctgctgaagcgggggtggacgacgtgctggccgaggccacgccagagaagaaactcgcgcgtattcgccatgagcagaacgatggtcgcctggtcgccatgtgtggcgacggcgccaacgacgccccggcgctggcccaggctgacgttggtatggcgatgaacgacggcacccaggccgcgcgcgaggccgccaacatggtcgacctcgacagcgacccgaccaagctgctggacgtggtgcagatcggcaaggaactgctggtgacccgtggcgcgctgacgaccttttccatcgccaacgacgtggccaagtacttcgcgatcctgccggcgctattcgcctctatctacccgcaactgggcgtgctcaacatcatgcacttgcagagcccgcagagcgcgatcctctcggccatcgtgttcaacgcgctgattatcgtggtgctgattccgctggccctgcgcggcgtgcgcgtacaggcggcgagtgcggcggcattgctgcggcgcaatctgctggtctacgggctgggcgggctgttggtgccgttcgtgggcatcaaggccatcgacatgctgctgaccgcgctgcacctggtttgacctgtccgctgatcgttcccacgctctgctgatcgttcccacgctctgctgatcgttcccacgctctgcgtgggaacgccgccaccccggacgctccgcgtcccaccgcaccactgaattgaggagtctgaaatgtccaacatcatccgcccagccctgagcttgctggtactcatgaccctgatcaccggcgtggcctacccgctggtagtcactggcgtggcgcaagtggccttccccgaccaagccaatggcagcctggtgcacgaggccagcggcaaggtgcgtggctccagcctgatcgcccaggactttaccggtgaccgctggtttcacccacgcccgtcagccggtgcttttgccacagtgtccagcagtgccagtaacctgggccccagcaatccggccttggccactcgcatcgtcgaggaggccagcaagcagttggtgccgggccagggcccggtgccactggcctcgctgaccacctccggcagcggccttgatccacacttgccaccgcaggcgattgcctatcaactggcgcgnnnnnnnnnnnnnnnnnnnnnnnnnnnnnnnnnnnnnnnnggaatgcattccactgtgggagccgggcttgcccgcgatggcggccttgaagactctccataaatacctgaaggaacccccgagcatgagcgacgccggccgcgccgatgccctgttagccgatctgccccgggacggccgtggccggctcaaagtcttcctcggcgctgcacccggtgtgggcaagacctacgccatgctccaggccgcccatacccaactgcgccagggcgtgcgcctgatcgccggggtggtcgaaacccacggccgcgccgaaaccgaagccttgctcagcggcctgccgcaacaaccgttgttgcgcagcgaataccgtggcgtgatgctcgaagaaatggacctcgacggcctgctcgccgccaagcccaagctggtgctggtggacgaactggcccacagcaacgcccccggcagccgtcatgaaaagcgctggcaagacatccaggaactgctcgccgccggcatcaacgtattcaccacggtcaacgtccagcacctggaaagcctcaacgaccaggtgcgtggcatcaccggcgtacacgtgcgcgaaaccctgccggactgggtgctgcaagaggccgacgaactgctgctgatcgacctgccgtctcgcgagctgctggaacgcctgcgtgatggcaaggtgtatgtgcccgaacaggcacgtgcggccatcgatgcatttttcacccagaccaacctcatggccctgcgcgagctggccatgcaaaccgccgccgcccacgtcgacgacgacctggcccagggctaccgccaactcggccaggccgcgccggcggtgcgcgggcgtttgctggtcggcgtggatggcgatgcccaagccgaacgcctggtgcgccatgccagccgtgtggcccagcgtcggcatttgccctggagcctggtgcacatcgacaacggccgtgcgcgggatgagcaatcgcgcctgcgcctgcaaaacgcccagcaattggcggagcggttgggcggcgaagtggtgttgctgcgcgcgggggaagtggccaagaccctgatccagcacgccgccgaacgccgcgccagcctggtgctggtggggcagtcgcggatgcgctggcggcggcgcctgttcggtggcggcttggcggcacgcctgttgcgcaatgcccgcggcttggaaatcaacgtcctcgacagcgatgacatgcccgcaccgccacgtctgcccgatgtgcgcggtttggtgtggttcgattacgccttggcggtggtggcgaccctcgccgctgccgcagtggcctgggccgtgtccagtgcgttggcgctgccgaacatctctttggtgtttctcgccgccgtgctactggtggcggtgcgcagtagcctggggccgtccctggtgtgtgcagcactgtcgtttttgacttacgattttctgtttatcccaccgaatttttccttcgccatccagcgcgaagaagacgtgctgaccctgttgttctttctgttgatggcggcgttgaccggcaacctcgccgcacgccagcgccgccagttgcaggcgttgcgcgatacccaggaagaaaccagcgaactgctcgacctgtcgcgcaagctcaccgctgccaccgaccgccaggctgtcatcagtgccgccgcccaccatctgcaaggttggagcgacctcgatctgtgcctggtcaatcgcgacggtcagggcggctggaaggtcgagaccggtggcccgttgaccctcaccgaagccgaacgcgctgccgccgattgggcctggcagcatgatcagccggccggcatgggcaccggcaccttgccgtttgggcgttggtggtggtggccgctgtcgggtgaagaggggcccttggggttgctgggtgtcagtgccaagcctggcctggaattgagcgggcaacgtcgtcgcttactcaccgcgttgagccaaccgctggcccaggcgctggcgcgggcacaactggggcaggagctggaatcggcgcgcctgcacggcgaaaccgaacaactgcgcagcgctttgctcgcgtcggtgtctcacgatttgcgcacgccattgacgtccatgcgcggcagcatcgacagcctgctggccctgggtgaagccatcccgctggaggatcgccgcgaattgctcgaaggcacccgtgatgaagccgagcgcctggaccgctatatccagaacctgctggacatgacacgcctgggtcatggtgcgctgaaactggcacgcgattgggtgtcgcccggcgatattgtcggcagtgcccttgggcgactgcgcgccgtgctggcgccgttgcaggtgagcaccgatgtgccgccggagctgcctttgttgtatgtgcatgcggcgttgattgagcaggccttggtcaacgtgttggaaaacgccgcacggttttcgcccccccagggccgcttgcagttgcgggctggggtgcaggatgagcagttgttttttgccgtggcggatgaaggaccggggattcccgaggaggagcgggcgaagatcttcgacatgttctacaccgctgcccgcggtgatcgaggcgggcagggcacgggcctcggcttggcgatctgccagggcatggtcggcgcacacggtgggcatatcagcgtggccgatggcattgacgggcggggcacctgcatcaccttgtttcttccattgccgacacaacctgccttggaataaccctgtaggagcgagcttgctcgcgaaggtcgttaacgataatgatggcgccctgaatgcacgcggtgcctaggagtttttcgcgagcaagctcgctcctacagggaagggaattttttaatgggttttgatgagacaccatgagccagaccgcgacgattcttgtcattgatgacgaaccccagatccgcaaattcctgcgcatcagcctggcctcccaaggctataaggtgatcgaagccggcaccggcaacgaaggcctggcccaagcggccttgagcaaaccggatctgctggtactcgacctgggcctgcccgacatggacggccagcaggtgctgcgcgagtttcgcgagtggtcgagcgtgccggtgctggtgctgtcggtgcgggccagcgaaggtcagaaggtcgaggccctcgacggtggcgccaatgactacgtgaccaagccgttcggtatccaggagtttctcgcccgtgtacgcgcgctgttgcgccaggcaccggccggagaagcccaggaagccgccctgagttttggcccgttgaccgtagacctggcctatcgccgcgttctgctggacggtgccgaggtggcgctgacccgcaaggagtacgcagtgctggcgcaactggcccgccatccggggcgggtgattacccagcagcagttgcttaaggacatctgggggccaacccataccgaggacagccactatctgcggatcgtggtggggcacctgcgccagaagctggcggatgaccccacccagccgcggtttatcgtgacggaggcgggggtggggtatcggttgctaggtgcctgaacctttggtgcctgcgctggcgccatcgcaggcaagccagctcccacagttggcattcattccctgtgggagccgggcttgcccgcgatgaggccatcagcaacacctccacgctcaactctgctcactctcataccgatccaacgtatcactggcaatctcccgccccaaagcaatcaactccggcgctttgtagaactcgaaaaaccggcacacccgcttcggcacgttgatcagcacatccggtgggtacccagcgatcttgtattgcgccaatgaggtttgcatcacctcgaaactctggttgataaggtccagcagcgatgcaggcccgacgttgtcgatgatgaacgagccggtcgccgacttcggtgcgccggctttctccggcgccgcggcaggttgttgggcttcgggttcggcagactccagccacgggttgatttcggcggcctgggcctgcaaggcttcttgttccagtttcatcaactgctccgcctgcttgcggcgaaacggcaggtgcgagcccagtgacttggccaggctgttgaagcggctcttgaacgctggcgggcgctggatcaccggcaattgatagtgcttctggttggtggcgttgaggttgaccgcaatgatcaagtcacaatggctcgacaccaccggcacgatgggcagcgggttgagcaggccgccgtccaccagcatgcggttgccttgcatcaccggggtgaacaggctggggatcgccgccgaggcgcgcatggcctggtgcaggcagccttcctggaaccagatctcctgttggttggtgaggtcggtggcgacggcggtgtaggggatgcgcaactcctcgatattgatgtcgccgacaatcttgcggatttgcccgaacaccttttcaccacgaatcgcccccagacgaaagctcacatccaccaggcgcagtacgtcgaggtagtccaggctttcgatccagttgcggtactcgtcgagcttgccggcggcgtagatcccacccaccacggcgcccatggaacagccggcgatacaggcgatgtcatagccgcgtcgttcgatttcctcgatcaccccgatatgggcgtagcccctggccccaccggagcccagcactaaggcaacacgtttcttcatggccagatccttcgcaaaacaggggcccacaatgcacccatcaaggggcctgcttcaatccttgctgacagcgcgcaatatttttccaggctggcgatcaggctcgggtatgctctggcaataggtactactgatttcaggctaaggacaaggcacttttccctgtaggcaacgtctacaggctacgactgaatttgtatattttgaggtgtcatcaatgaaagcctggatctgtgtgcctgtgatcgtgttggccttggctggctgtgccgggaaaaccgcgtatcgcgacagctgcggctcgcaattggacgccgcctggaaagaactggacctggccaaggccgaaggttttgccggcactgtcagttactccaaggcgctgtcgctgttgactggcgccaagactcagcagcaattcgaagcgttcgagggctgctccaacaaggccgagaaagcgcggttctacattcgtgagtctcgcgccgggcgatgaccccgcagcgggcaggattttttatcgaaaagtgagggcaggatgtcagcgttggtcaatcagttagtcgctcaggtcattggcctggaagtagggttactgagctgccaggctcgcctcgccgccgtcactgacgatgaagccttgcatgatttgcgcaccactgtgcgacgcctgcgcagcctgttgcgccctttgcgcgggctgcccggtgtcgaacagcttgaattggccgccagcacggttggccaactgactacgccgctacgcgaccgagaggtgctggcggcgtatttgcatcagcacgggcatcacgaggcagctgatcggcgcctgcgtctgcagcccgaggcttaccgccaagtggcgcaaagcccggaactggcgcacttgctgctgatcctggatgcattcccgcggtttatccgcgcgtcccagcaccagaaactgctcaagggcttgcgcccgcgtatccagaagcgcttggccaagcaatggcagagactcgatgaggccctgaagaatcccgatcatgatcgccaccggctgcggttgctgatcaagcgtgtgcgctacgccgccgaggcgtatccggagctggacaaattacccgctaatgctctgtcgcatttgaaaaaagcccagagcgctctgggtgattggcatgactgttggcaatggctggcccaggccggtcacgagccagacctgcaaccctgtgtcgcggtgtggcagcgcaccatgctcaaggcgcaaggcaaggccgaccgcgtgctggacacactcagcgccgagtgtttttaaaccggtccggtttttggccggaataggcgctgtgcctgccgaattggatggttaagattcctccacgattttcttgatgtgaggtcgccatgcgctttagtgatttgctcgatgctgcccgtagcaatccgctggatgtcaccattcctgccgaatgggcccagggccgggctacctttggtggcctggtcgccgccttgcaatacgaggcgctgcgcgctcaggtgccggcggatcgaccgctgcgctccctggccatcacctttgtcggcccggtagcgccggatgtacctgccagctatcaagtcgaagtgctgcgcgaaggcaaggcggtcagccagttgctagggcgcgtggtgcagaacggtgaagtggcgaccctggtccaggccagttttggcgcttctcgcccctcggaaattgacgtggcaagtgagccgccaccggtcttcaaacattgggatgagtgccaggaactgccctatatcaagggcgttacccccgaattcatgcgccacttggcaatgcgctggagtgtgggtggcctgccgtttaccggcaataaatcccgcgacatgggcggttgggtacggttgcgaggggatgtaaaagaagagccactgaccgaggcgcacatcctcgccctggtcgacgcctggccaccggcgttgctgccgcacctgaaaaagcccgcgccgggcagcaccctgacctggaccatcgagttcatccagccactgcaagacctgaccacactcgactggtgccagtaccacgtcaacatcgaacacgcccgcgacggctacggccacgctgccgctgccttgtggagcccgaccggcgagttgatcgccctcagccgtcagactgtggtggtgttcgcctgaacctgccggtcagtggtggtgccgctgccgccaggcgcgccaccagccaccgctgagcacaaagcgcgggaaagtcacgaactgctcgaccaccaggcgctgcaccgcatctttacgatcgctgaacggctcactggcctgggcctccaggctatggccatgacgctgcaacgccaggcccgcgacaatgccaatcacgccgaccgcgaagctggccaggctgagactgaacacgcccgacacgatcagcaggaaaccgacgataaacagcggcacggcaatcaggtgcagcgccaggttggtcgggtgctgatggttctgtgggtactgacgccattgccaggcggggagattggggtgacgtttgcccatggtggtgaatcctctgtccgttgaaacaacttgaacagagtttaggttgaggtgggcgaggtggcgaattggggctggctatggacctcatagtctgcaatttaggcggagtggcgctcatgcccaaatgacacagtcatgatcgtccatgtgtactaagaacgtcagctcgttatcggttatccaaaacggatatccggtggtttcgcctaacaaagaggcgagcactcgagcgttttccattctccaggcgctgtacgctgaatctaataccagcagaaccaggccattcccgctaatgcgatgcggcacctccttccaaaagtcagggttgtgttcggtgcttttctcgttcagttcgacgggatcaagcacattgctttgcgctttgaagaattttctcgtcagagagcttatcaacaagttgagttcgctcgaatcaagctttccagcgtcgaggttcagcgcattaaaggcttcgtctatttcgtcttccagataactcatcaggggacacctattctggaccggctgacaggaaccagttggagcagtatatggcctcttttggctcctccgtcgcctctctttccaggtgtttgatagccaatatgaggtgatttcgggccttctttacttggcacaagcataggatcgtcaatattcacttccgctcctctattgggaccggtttgtactcgccattctgttggaaatgatttgccatattggtctttgccccatttcgatacgctgtattcggacctgggtatacccgttctgcgaaaagcctcatccaaaccattgtgcatttgcgtgtagctgtcgccggtttgttttctccagtccagatcgacatcgggattaagtttccagctgttgctcgtacttggaggagggcagtctgaaggtgcacaagctaaacctaatggatcaatccaccctataggattgggcacgtactggtacccattgatcccccccgccaacttcaccgggtccggtgtcaggtagcgaccaatatccggattgtagtnnnnnnnnnnnnnnnnnnnnnnnnnnnnnnnnnnnnnnnntggtgctcggcggtcaggcggttttggcggtcgtattcgtaggccaacgcccagtgaccgtcttcgacgctgaggaggttgccttggcggtcgtaggcgtagtcgacaacgttgctgtcgggcagggtttttcttacgaggcgcccggcgtggtcgcgctcgtaacgggtgatgagctgactgccatcgtcgccgtattcggatttctccagcaggttgccgttgaggtcgtaggcgtaggcggtgcgctggccgtcgaagccggtttcctggcggatcaggccgttggggtggtagtcgagttggtaggtttcgccggcttcgttttcgatctcggtgagcagcagccgtgtgttgtcgtagcggtacttgacctgggtgccgtcggcgttgagacggcggctgatcaggtgcaggccaccttcgtattcgtagcgggtgacgtggccgagttcgtcgcgttcggcgatgattttgccgtaggggttgtagctgaattcgcgtgtggcgccgcctggcaagacgaggcgaatcagccgaccgacgctgtcccattcaaagactgtttgcgcgccgtgctcatcctcacgggcgatttgccttccgaggtcgtcatagcgataacgcttgatcccaccattgggcaattgctcctcaagcaactgcccacgctcattccacaccagccgatggcaactgtgatccgggtaccaaacccccgtcagttgcccgtgtttgttgtagctgtagtcgatcgcgctgccatccggatcaatcttgcggatgacgtcaccctggtcattgcgctcatatttccaaaccgcctcaccgcgccttacaacccttacgaagccgttgtcatgctcgtaagatgtcggctcgtcatcccccggaaacaacgccaccaagcgtccggcttcgtcgtactgatacgccgtcaccgcgcccagcggatcctgttcgacggtcagccgcccctcggcattgtaggatttgaaatgctgcgcgccgtccggatcgatgcgctgcaccaaccgcgcccgctggtcatggacatacacttcctggctgccatcggcgttatgcacggtgacacggccgtcatccccccaggcatagcgcgtgtccatctgggaaaaactcgcccaatgccggacacaccgcgccgctttgccagatcgttcccacgcccagaagaaactcgccccaccggccagttggcgttcaagaatgacgtgctgatcgtcgtaccgataacgctcgctttcaccgacagcattggtcgcgcaaaccagtcgtccatcttcgtcataggcgtaggaaacgacgttctgctcggtctcccacacgtagggatcacggcctttggcacgatgaacctggtagtccaccgccacgatgcgatccaattcataacgcagcagcagcgagcggccagcaccgttatccagccgctcaatccgcccggagggatcacggcaaatgcgcagccggttgtcatacgcatcgctgatcgagaccagcacaccatcgcgaaagtgatagaaccgcgacgcctgggccagcactaactcatcaggagccgagcccaagtagatcgctgcttccgccaggctattggtgatcgcgggtcgggcagatgtgggcaagggcagggtagtcgagcggttctcatggtcggtccacaccaccgaatcgcccgacagacaaagcctgtgcgccagcgcatgactccagccaaaccccaacccgcaatccacatccaccgcactggtgcgatacagccgcgtccactcaaacggcaaaaccccgtccagcgcgccatcggtgagggtgagcaattcttccccggtgaccatcgacaccgggcagccgttggtgaccgtcttgtccgctggcgccgtcgcatcccctttcggattcgacgccacggcaggcagatcatcgacgtgttcctgacggaccaacacggtctgtcgggtcttgttgcgaaccaccggcaccgggttcgaaaccagcgtgtcgccggccttcaatggaaccactggcacggccttgaccggcgtcgccgcattgctcagcaacaccggcttggcgacctcgacatgagcttccagccgaggccccgtcacctgcttggccagcaattccaacaacgcccgcgcccggccggacttgacgccactaaggatctgagcacccaggcgcagctggaccccaatgcctcgcgtggcccagatcagcagtagattgatcaagacttcgccggtgatttcacccagcagttcgtacatgtcaggtggcggcagcatgcgtacccaggccaccagcgccgacaggtagataaacaacagcggctcatcactgagtaccagcaaccccttggccagcgtgtctttgcccagcttgagcagcgccttcagctcagcttcggacaggtacttcagcaacttttcgctgttggatttgagattggcgagcaggtcgtacagctcggtgatgttgtcccacaggttataaagcgcgccgccaagcccggcagcaaaggccatgccctgtaacgcactgcgcttgtaagcaggcgctttggcaaagtctgcccatcgaggcttgaagtactcggcccaggccttgcgcaaatccgcttccagcccggcgatcacagactcataggacgcatacagcgcctggacgtgagccttggaaacgttggggtaaaaggtgatttcgtacgtctggtcgcgggtacagtcgttgacttcaagaatgccgctggggccaatggtgcgatgcagtggcgcacctaccgggctgccgtcccgagcaacggcttgcagcatcacaggcgtgttgccgatgggcacgaactgcgtgctttcgaacagatgcaccagggtcagcccgccctgggctttgcattgagcgaccgtgcgactggtttttttggaagaagccggcgcgaccagtgcgacctgttctcccaccttgaatacctgctccacactaagtgccgaaccacttaaaaagctgtcggcccacgtatcaaaggtattcaggcaggtgcggaaatccgcaaatacgcgctcaaccttcggcgcttcgggatccatcggcaccagcaccaggttggccaacaccgagatcaagagacagccccatccattagggctttaacgaaaaccaccatctgcaatccctcgcactgtttgatcaggcgagggactttgcagcggttgtcaggtaaaagaagtcggcgttattcgcgagaggggcgaggaagtttcgtcttaacctcaggtaaaccgaggcttggtcgtaggagtcggattacagctggaacagtcttacaacttcaactgcccaatcgccttgctcaactccccagccagcgtcgccagttcattgctggtagtcgctgatgccacggtttgatgcacggtgttttcggtcacatcgcgaatgctcaccacggcgcggttcatttcttcggcgacatggctttgttgctcggcggccacggcaatctgggtgttgctttcgcgcatctgtgccacggccccggtaatttcagccagcgcgatgccagcttcctgggcctgctgcacgcagtcatcggccttgaatgagctttcctgcatgaagtccacggcgtcgcgggtgccggcttgcagtgccgagaccatgcgggtgatttcgtcggtggagctttgcacgcgcttggccaggttgcgcacttcgtcggcgaccaccgcgaaaccgcggcccatttccccggcgcgggcggcttcgatggcggcgttgagggcgagcaggttggtctgttcggcgatgctgtggatcaccccgaccacgccgttgattttctggctgtcttcagccagtttctggatcatttcggcggtctgctgtacgccactggacagcccggcgatcgaacgctgcacccgagtgaccacagcctggccgctgccggcgagggtgtcggcggactgggacaagtcacgggtggcgcctgcgtgctgggcgatgtggtagacggtggcggtcatttcgttgatggcggtggcggcctggtcggtttcgctctgctggccgagcatgccgtgttgtacctcgttcatgctgctagccaggcgtgcggcgccgtcgtccagttgccgggcggtgcgggccacggtattgaccacccgctggtagccggcttgcatggcgttgaaggcactggccatctggccgacttcatccttgcaggccaatggcacccgcgccgagaggtcgccggttttttcaacgtgcagcatcacatccttgagggtgttgagttggctgagcagaaaacggatcaacaactgcgaggcgccgagcatggccagcatcagcactgccacagcgacggcgtaatgagtgaagcggtcacggaacacctggctcaggctcggcgcgtaggccaggactgcgacctgctggccgtcggcccggctgatcacttcggcgccgatcagcgggttttcgccgaacaacggcatggggttgagttcagtccagccgttggcagtgctcagggcgggcagatcctgggggatctggcctttggcaaaggtgagccagtgctcacccgtgggcaaggttttgtcggctggccaggcgctgagcatgcgcccctgggcctgggccgatgcctgcgacgcctggctgcgcgcctgttgttcaagctgtacggcgtacagcaccagcaacagggtggtgatgaaggcgaccgcattgacggcccagaatttgtatttgagcgagatattgctaagccaggcacccatggaaggttttctctgatagcggaaacagtattggcaaggtgccattattgtgccgctattcagaaaagcgcttttgacatgggtcaatgcgctgcattaatccacggcaggcaaaccgaaaaagcgccgggcgcaggcggtgctgtgcagcgccaggtcttccatcgtttcgttacggtgcagggccacttcgcgcagtacttcgggcaggtacgccggttcattgcgaccattcttcggcttggggcgcagggtgcgtggcagcaggtagggcgcatcgctttccagcatcagacggcctcggggaatttccctgaccagcggatgcagatgagtgccacggcgttcgtcgcagatccaacccgtgatgccaatgtgcaagtccaggtccaggtagctgaacagcgctgcctgttcaccggtgaagcagtgcaccacggcggctggcaggtggtcgcggtagtccttgaggatctccagcagacgctggttggcatcgcgctcatggagaaataccggcagttgcagctcgaccgccagggccaggtgttcttcgaggactttttcctgctgggggcgaggggagaagtcccggttgaaatccagcccgcattcacccacggcgcgcactcggctgtcgcccagcaagctgcgcagacgttgggcgctgtcgctgttccagtcgctggcagagtgggggtgaatgccggcggtgctgaacaggcgttggccgctttcgtcgagttttacacacagttgctgggcctgttcactgccctcgacgctggtgccggtgagtaccaattgctgcacgccagcggcgtaggcgcgttcgagaacggccatgtgcctctcgtcgaaactggggttggtcaggttgacgccaatatcaatgagttgcatggtgctatctccgcctgcggccggaaagcatatcagagctgtagattgataagaaaaaccaagaactacaatgcgttaacgctgtctttgaacgtcgcaagcgacattgtggtgggccgattgcctgccaccgtggcgccgttgcacgccttgccagcgcataaagcgctctgtttctgaccaccagcactgcgttatttgcgcaggcgctggccagttttctttccggagagcggatgatccgaccctcggcgttgcttatgttgtgcctgacgttatggctgcccatggcggcggtcgcacgtctggatgggccgctgcaagtgaccaagcccggcaaggtccgtgacctggcgcaaattcgctccagccgcaccctgcgcgtcttggtcaaccagagccgcaacagttccggtgaagtgcagggccaggccatcggcgtcgaataccaccggttgcgcgccttcgagcaatacctcaacggccatgcccgtgatgggcaggccatcaacctcaagatcatccccaaggccaaggaccagttactcggcgcgctggcccgtggtgaaggcgacctggtggcacccggtgagttgctggatgtgaagggcgtgcacaaggtcagcgccagcgccccgattgtcagcgatgtgccgttgtggttggtgggcgtcaagggtgagcgacgctttaccaagctggagcaactgtcggggcgcacggtgacgctgaccacgggcagtgcggcggcggatgccatcagtcaggtcaatcaaaagctggccctgcacaagcgtccaccggtgaaagtggaatgggttgaccccagcctggcggtggaagacgtcctggagatggtgcaggcggggatttttcacctgacgatcgtggaaaaaccgattgcccaacgctggtcgaaaatcctgcccaagttgcgctttgacaagcaggtggtgatcagcgagccgggcgacgagttctggtttgtacgccaggacgcgtcgatgctgcgcgccagcattgatcggtttatcaagacctatcacacgccttccgaccaggatgtggccttccagcgtatctatcgacgcctctaccaggtccgtaacccattggcgcgggctgaccgccagcgcctggaaaaactgcgcccggttttgcaaaaacatgcgcgtgagcaaggtatggactggctgaacctggcggcgttggcgttcaaggagtcttccctggacccaggtgcacgcaacagcggcggccccaccggcctgatgcagatcacgccgtcggcggcccagcgggtggggatcaacaatatcgagacgctcgacaataacgtgcaagcgggggcacgttacctggcgatgatccgtcgcaagtttttcgccagccccaagctcaatgagcgcgagcgcatggcctttatgctggcggcgtacaacatggggccggagcgagtgcaaggcatgcgcaccgaggccaagcgccgcgggcttaaccccaatcagtggttcttccaggttgaacgcattgccatggagcaggtagggatgggcggcgtcagctatgttaatagcgtcaacaagtattatttggcgttcgatcgggagcgggagtcccttgagccggtagctgctaaaattgcctcgcgcaaataatcgaattgttagatattaattaggcgatatttcggcttttatcattgcttaaactgattaatatagcggccaaccaacccctacctggaaaaggatttaaccccatgagcccaatgattacccgtgtactgtccactcgcgccggttatggcctgactattctgcgcatcttcgtcggcatcatcttcgctgcccacggctcgcaaaaactcttcggctggtttggcggtggtggcctggcgggcaccgcacaatggatggaaagcatcggcctggcgccgggtacgctgatggcgctgctgtcgggcggtaccgagttcttcgccggcctggccctgatcatcggtttgctggttcgtcctgctgcattgggcctgaccttcctgacgctggtggcgattttctctgtacacatccacaacgggctgttcatggccaacaacggttatgagttcgcactggcgttgctcggtggcgcgctggcggtgttgctggaaggtgcgggcaaattgtctgtcgaccgcgcgatcactcactgatcgttttgcaagctgcacaaaaggcccgctgatgcgggccttttcgttgcccgggattcttgacactgccccaccggcttctctaggatgctgctcatgcgccgatttaaacagctaattgcggggcgccactgggtctcaatgcagcccgacagaagcacgcttgctcacgcagggcgttcttcgaaataccgctaaagcgctggttcggtgttgcctctcacctgcccgcagacttttgaggcagagacacgacacgatgaatgcactacgccccctcatacgcctggccccgatcaccgcggacctgacgcaacgcaatccgaaaatcctgctgggcggcaagcaccagccgacactgctgcgctatctggacggctggccacgtcgttccggtcggccctcggcgttcctgatccagtttgttgaagacggcgattccctggcccgttttgccagcgacagtttcgacctggcagtgattcaggcaccgagtgccagcaatgcccatgaggtgatccaccaactgacgcgcattgcccggcaagggctgattgctcgtcggtgagcgattagtgaaagatcgcgggggtacgacgccggcgctggtgtaggaaaagtaaccaggcaatcaggcacaacagcagcggaaggggcacgattatcagccctctcagctgtcgctcgaaacgctgcaccggggcataggcctgcgccttgaatgcatgcaactcgatgggcagttgcaggcgctccttgttcagtgcctgcaactgggtactggtatccaccgcttgggtgataagccgtgtgtgcagtgggttcaactttcgccatgcttgctccgtctgctcaagtcgtcgctccagctcaaccgaatttttccgatacgcctgcgcggcttggtcccgcatctgatccagcctgtgcaacggttggtgcatgacacggggtcgaatgcgtttgagtgcgtcgggcgccgccaggttatccaatgtgttcaatacaaactgcgcgttgccgttgggtcgtgcctggctgagagtgtccgctagcaggtcagtgtcggccacgactaccatctgaatcagttctgctttttgcagcccgggcggctggcccttgaagccgtcgggaaacgctgagtaggcgggcccctcaacgcgcgccgcgattacatggcgctgccctgaagttgccgtttcatcgatgagcgagtcgaatgtcgtcgccgaggcaaagcgtttggcgttcaacagggccgattgccctgagctcagtagaagcggggtcaacagtgagcggcttttgggcgctagcgaaagtgcgccactgcttgagacgatgacgctgtccagcccccaggtgctgatatctgtcgtggccatggcctgtcgcggcaggtgtagccgggccgggtgcagtacccggggcattcccggaccgggcgtggctgatgaggcataaagattgtcgatcaacagcttgtcctccggcatctggatgccccaagcgttcagcagcccctccattctcgcgttcgctgacacggcgtcagcgcctatctcgctcacggggtcgatgaacatcatcaacggggtgcctttcaataccgattgctcaatggcatataaggcccgctcaggtaaggcgtgcggctgtatgaccatcaatgtcgcgatggatggcggtacctgagcaatgttcgccgccagttccaccacattgaattgctcgcgcatcaacgccagcagctcgctgcccggtttatccagcgacaggcccgacagcaggccgacagtggcacgctcaggatgccccaacttagagatcaggtggctgatctcatattcaagtaatgactcgtgctcagggcggaacgcttcgatgcgttgggcgccctggccagcgcgggtgccgataagaccaagaaatccttgtgtgtcatcaagcccgaacaagctggctttgtaggcgtcttcagaaaagggagcggggttaatgatatgtaagttgatcatgccgtttgccgctttttcgaacgccttgagcacgtcttcgacgcgtcgaccataacgttctaatgcctggcttttttgcggcgcatggagggtattgaagtaatacagatccagtgggctttcaagtgaggcaagtagttgccgcgttgctggggataacgtatggattttttcttgggaaaagtcccattgggcagtaggtagtttgggtacccagactagattgagtgccagaaacagcagtgatatgacgagaagtgtcatacccgcacgaaaagcggatcccatcagtggtcttccttttctcaactgcttttgtagttgagtgttagggtggttgcaaacagaaaagcaacgatcatgctgataaagtacaggctgtcatgcagtgtgagtctgccgttatccatcgcgctgaagcgggcaatgggatccagggacatcaaactgtcgataacccatatcggtgcttgttgttcaagtgcatccagtactgacgaaagcccactggcggtcagcaacaagccgagggtgaaaaagaaaatcagcaggcgttggttcgcaagtacacagatgaagcaacccacggaaagataacttcccgccagcaaccaactggccaggaactgcgaagcgataacgctattgtcaggcgtgcccagataatttacggcaattaccaaggggaagttaagcatcagcgcaatgccacagacagtccatgctgcgataaatttgccgatcactcgttccactgaggtgacaggcaaggcattcagggtgtcgtaaaagctgacgttggattcatccgaccacaactgcgtcgataacagggggaccagcaggagatagagccagggatgcagatcgaaaaaggcctgcagatcgctgctgttgcgctccatccattggctggaatgcagccccagcactgcgcatagcgcgagaaaaatcgccacgctcagataggtgctgggcgcgcaggcatagttggccagttgtcgtttgaaaatgacaggtagcagtctcaaggtgttacctcttggctcagatggtgaacgacatcgttcaggcgacccggctccagattcattgacgtgatgttccagccgcgatgggtgataagcgcgttgattgcggaaaatatgcaatgcccaggcatggccaggaccgtcaccttgccgggtgcatgtcggtcttcttcgatgccggcgacgccgggcaatacggccagcgcgagcaagtccagcggggtgtctgctgcgagggtgacggcctgaaaatgccgggagctgcgctgtaaatcgggcagcgaggcatcggccaccaggcggccaccggccataaccaaggcacgggtgcagatgtccgccagctcctggtaatggcgggaagcgatgatgatggtcatttcctcgttcagggactggatgagtgcccggaacttgacgcgttgatcaggacagaggccttctgtgggttcatccagcagcagcaggcttggcgcatgcaggagcgcctgggccattgccactctgcgcttcaagccaagggaaagtacgctgatggggcagtcgagtacgggcagcagttccaggcgtgcggccacctgcgccacctggctgcgtttttccagcccgctcaaaccgcgaatggcagcaatgaaattgagcatgtgtttgacggacatcgtgtgatggtcaaggccgccttggagttgatagccaatgacctttttggcttgagttgaatgggtatgggtattgaaaccttgaacagtgatgtgcccggccgtcggcttgatcgccccggcgatcaagctcaggagtgttgtttttcccgcaccactctctcccagcaagccgatacactcctggcgctgggcacagaaggacacgttgctgattacgcgtgttttgcccagctgttttgtcaggttgcttatctcgatcatggttttaccgaataagttttgcagggcgtgtgagaggggccggcagtatggaaaagtgctttaaaaagggtacgttcaatatgaaggcttgggaacgcgaagtatgcttaataagaagaatcctacgttcgacccgataattcgctgaaacaattgttttgttttgaatacttattaatgcccagatgtttatcggatgtttatataaggttttttcttttgtaatgaggcctgattgccatgatgcttttacgtactcttgttcttgagcgcaacgatgaagggacgcctgttaacggcgccttgttgtgcgggtttgctgttacgcaaacggcgtccaactttctggtgtatagcctggatgaggaggccgagcccggccattccagggtctatatcgcggcactgcgtaaaaagattgaacggtatttcttgggaggcgttgattccaaagaagacctgcaattagccatgcaggtcttcaaacagatcttgacgatggcagccgcagctggctcgaagacgacgcccattgccgaacctcaggttccctttcatttcattgatttgaaaggctgccggttaccgccggccaggccagaggatcaccactcggtgatcatcaagaaggctctggtcatgaaggtcatcaccctgggcatgtcagccccggcgttgcctgcgatcgaaagcagcgcagtgatcgtgccgtccattcgcttctcgtcgcaaatggttgcgccgccgcgaaatccgcgctcagtcacgactgcgccgcagcctatggatgaagacaccgttgaggaaccggcgcggtcgctggtcgcgataccgcaggagcaggttgagaccattgcgtcgccggttctggttgaacaaaatgacagtcagtttgagccagacaacctgcggttggacccacctgagcctgagcccgaacccttggacccgcctgctcagatggaccatacctctttgctcgaaatggacagcgcactgagcaacctggccaaggtcgcccaggaactgacgcaaaaaaaatgcgcagtactggagaaggaacagatgctcgaacagtggcaggcgcgattgcaacagcagcagagccagctggaagagaagggccgtgaacttgaacagcgccatgcctatttgcaggagcagggcttggaggtcagccagaaggccgagaagctggcaatgatgatgttgcagttgtcgggtatgcgccagcgtatgcagggcacgttgcttgagttggatcaagtgctggaggggcatgggtgaggtaatggggcgccggcctggatactttccagggttcatttatcatcagtcccagccagccgctgcctgggcatgatgccctggcataacggcaccattggacattgcctggggatgcaagcgtttgagtaccaagctgattaccaaagaaggtcatgaagcgctgaaaaaagagctggattacctgtggcgtgaaaagcgtccggataccacgcgcaaagtgacctgggcggcctccctgggagatcgcagtgaaaacgccgattaccagtacaacaagaagctgttgcgcgagatcgaccgacgcgtgcgttacctgcgcaaacgcctggaagacatgcgggtggtggagtacatgcccgagcaggagggaaaggtgtttttcggcgcatgggtcgaaatcgaaaacgaacagggcgagaccaagcgctttcgcatcgtcggttatgacgagatctacgaccgcatggattacatctccatcgactcacccatggcacgggccctgctgcgcaaggaggtggatgacgaggcaatcgtacagaccccaggcggggaggtgtgctggtggatcaccaagatcgaatatgtgaagcccgcctgatggcacgtaccttggctgggtacgtgccatccgggtttcagccttcgcgcaatacggtcagcgggctggcattcagcgcacggcgcgtgccgaacactccggcagcgccaatcaacaaagcaccgatcacgggcagcagtaacaaccacgggtggggatgccacgccaggtcaaaggcgtagcggtacagcacccaggtcaccagttcggtgcccagtgccgccaacaagccgctgacggcgcccagcaggccgaactcaatgcgtcgggccttgaccagcaacttacgctcggcacccagggcgcgcagcaatgcaccctggcggattcgttcatccagggtggcctgcaggccagagaacaacaccgccatgcccgccgcgagtacaaacaacagcacgtattcgaccgccaaggtcacttgggcaaggatgctgcgcaattgctccagcagggcctcgacctgcaggatagtgaccgccgggaaggcccgtgacaggtcgacgatctgttggtcatggccgggagccagatagaagctggtgaggtaggtcgcgggcagatccttcaaggtgcccggttggaaaatcatgaagaagttgggctggaagttatcccagttgatggtgcgcaggctggtgacccgcgcctcacggttttcccctccgatggtgaacaccagatggtcgttgagcttgagcttcaggctctcggccactttggcttccaccgacacgccaggaaccccatcagtgggttgcgccgaccaccagctacctgccgtcaggacgttacccgctggcaagtcggctgcccaggtcaggctcaggtcgcgttgagtggcacggtcgccgctggagtccttgctgacaatctcctgcaccggttcgccattgatgctgatcaagcgccctggtaccaccgggtaaagcggcgccgcttgcgcctggacatccagcaggcgggcgccaaaggcgtccttgtcggccggcaggatattcagggcgaagtagttgggtgcatccttgggcagctggttttgccaggtgtcgagcaattcgccccgcaacagcgcgatcaaccccatggacaacaggatcaagccaaacgccagggactggcctgccgccgccaacgggtgacgcaacaactggcccaggcccaggcgccagggcagggaggcgcgagccaataaccgtcgcaggctttgcagcaacagcaacagcaagccacccaggagcaacgcagccaccacaccgccaccgagtaatgcgaaggtcaataccaggtccaggctcaggcgccacatgatcaggcccaaggcaaacagcgccgcgccgtaaaccatccaagtgcttgaggggataggcagcaaatcgcggcgcaacacccgcagcggtggtacccggcccagtgcggccagcggcgggagggcgaagccggcgagggcgaccagcccggtaccgatcccggcgacggccggcagcagcccgcccggcggtacgtcggcggggagcaagtcgtgcaggaaatagaacaggccaaactgcgccagccagccgagcagggcgccggccaggctcgccagcaagcccagcacactcagttgcagggtgaacaacaacatcgcttcacggcgcgacaggcccaggcagcgcaacaacgcgctggcatcgaaacgtcggctggcgaagcggttggccgacagcgccacggccacgccagccagcagcacggccaccaggctggccatgttcaggtagcgttcggccttgcccagcgcgccgccgatttgctggttgccatcgcgggagtcctgcaggcgctggttggcggccaggcccggtttgaccaggtcgcgataggtttgcagcgcagtgctgccttgcggcgcacgccatagttcgcggtagctcacccggctgcctggctgcacgacaccggtggcgtccaggtccgccaggttgatcatgaccctgggcgtgaggctgtagaagttgccggcgcggtcgggctcataggtcaggatgcgcgccaagcgcagggttttcatgccgacatcaatgctgtcgccgactttcaggtccagcgccgtcagcaatcgtgcttccacccaggcttcgccgggttttggggcactgcccggaacttcagcgccgaaaggctcggtgctgcttttaagctcgccacgcagcgggtactgctcgttgaccgccttgatactggaaagctggatgccattgtcggtggcgataacgctggagaactccacgatgcgggcgtgatccaggcccagttcggtccctgatttgatttgctcggggcgggccggcgagctgccttcgagcaccaggtcggcgccgaggaactcggtggcacgcagcagcatggcgccgttgaggcgcgcaccaaagtagccgatggcggtgctggcggccacggccaccagcagggcaaagaacagcacgcgcaattcaccggcgcgggcgtcgcgcagtaactgacgcatggcaaggctgaacagacgcaacagcggcaaacgtgccatcaaggctccaggggcgcgaccatcaggccggcttcaaggcggatcaggcgtcggcaacggtgggccaggcgctcgtcatgggtgaccagtaccagggtcgtaccgctctctttattcaactcgaacagcaggtcgctgatgcgctcgccagtatggctgtcgaggttgccggtgggctcgtcggcaaacagcacatccggttcggcggcaaacgcgcgggcaatcgccacgcgttgttgttcgccaccggacagctggcgaggcgagtgggtcaggcgctggcccaggcctacgcgctccagcaggtgtttggctcgctcgcgggcgtcctggcgaccgtccagctccagcggcagcatcacgttttccagcgcgttcaagctgtcgagcaactgaaaggattggaatacgaagcccacatgctcggcgcggatgcgtgcgcgctggtcttcgtcgagggtgctcagggcttgcccggccagggtgacttcgccgctgctgggcaggtcgaggccggccagcaggcccagtagggtggatttgccggaaccggagctgccgacgatagccaggctatcgcccttgttcagttccaggctcagttcgtgcaggatagtcagttcaccttccgcgctgggaaccactttgctaaggtttcgcgcggtgagaatgcttgcgcccatggagaatccgatgcgagtgtggtttttgagtgctggcctggccttgatgtgcatggcccagaacgcagcggcgggtacagtcctgatcgttggcgatagtatcagtgccggtttcggcctggatacccgcaaagggtgggtcgcgttgctggagcaacggctcaagcaggagggttttgacgataaagtcgtcaatgcttccatcagtggcgacaccagtgcaggaggcctcgcgcggctgccggcggcgcttgcggcgcataaaccggatgtggtggtgatcgagttgggtggcaacgatggcttgcgcggccagccgccggcgcaattgaaacaaaatcttgcgtcgatgattgaccagtccaaggccggtggtgccaaggtgctgctgctggggatgcagttgccacccaattacgggcctcgatacaccaacgcgtttgcacaagtctatggtgcattggccaaggaaaaaaacattcctctggtaccgtttttccttgagggcgtgggcggtcatccagagctgatgcaggctgatcaattgcatccggcagtcgcggcgcaaggcaagttgctggaaaatgtctggccaacgctaaaaccgctgttatgacgcttttctaccggcaggctttcggctaaggtggcgcccccccgatttggagccctcgatgtcgcgccctgcctggtccctgtttaactaccaactgatcgagccggacgagcagctggacctgttcgcctgccaggaagtgcgggtgcatttggtggcgcgtcaattggaactgggcggctccatcgaccgcacgctctgcggcactttattgcccgcacagccacgctggtcatcggtcaaccgctcgatttttcaagaccagcgactctgcccgttatgccgggcgattctcgaatcgcaaaagcgcggcacgccgccgatctggccggagctgcgcttcgagctgtaaaacagcttgaagcttggcgctgcgaagccgtatacaatcagtttttccctacccgtcgtcttgcgaaggattttccggatgttgtcgcgcctttccgtcgtcacctgctgcctgtctcttgctgcgctttgtgcggcgggttcggcggcggccttgcagttgcccttgccgccgcccggtgaggacattgtcggccaggtccaagtgatcaaggccaagtacgaagatacctttgctgaccttggcaccacctacgacctgggctattcggaaatggtcgcggccaacccgggcgtcgatgcctggttgccgggcgcgggcaccgagattgtgctgcccacacgctttatcctgccgcccgggccgcgggaaggcattgtgatcaacctggcggaataccggctctactactatcccaaaggccaaaacgtcgtctataccttcccgctgggtattggccgggaaggctggggctcgccgattgcccataccagtatcatcgccaagacgcccaacccgacctggacaccaccggcctcgatcaaggccgagcacgccgccaacggtgacccgctgcccaatgtggtgcctgccggccccgacaacccactggggccgttcaagttcaccctgggcacgccgggttacctgattcacggctccaacatgaaattcgggatcggcacgcgcaccagccacggctgcttccgcatgttcaataacaacgtgttggaaatggcgggcatggtgccggtgggcacgtcagtgcgcatcatcaacgacgcgtacaagttcggcagcagcggcggcaaggtctaccttgaagcccacacgccgttgaacgatgacggtacgccctcggtggtcgacaagcacactgcggttatcaatgcgttgctcaagcgcgaagacctgtccaataacctgcgggtcaactgggaccaggtacgtgacgtggtcgccgccgaggatggcttgccgaccgaaattggtgtgccaggcgcggcgcctgtggcctcaagtacgccggccgacctgctgtaggagcgagcttgctcgcgaaaaacctgagggcgccgctgtcattcaggacgcccgcgtcatcgttgaccatcttcgcgagcaagctcgctcctacaggtggcgcgtgccaaatcaaaggcaaaaaaaagccgacccataaatggatcggcttgataacaaccccgaaggattattacttgcggcttgctttttcaagcatgcgcagagcgcgctcgttagcttcgtcagcagtctgttgtgctttttgagcagcagccagagcttcatcagctttacggtaggcttcgtctgcacgggcctgggagcgagctgctgcgtcttcagttgcagtcagacgagcttcggtttctttggagacgctgctgcaaccggtagccagaactgcggccagagccagagcagagaatttcagaacgttgttcatcgtgttccccttcaaggactttcaatttaatggctactttctcagagtgagctaatagccggcgtacatactacccattacttgtagtaagtaaactgacgttgcgcaagaagcaaaaaaatttcttgtgccgaatctattttggctaatcttttgacggtttgtatgaaaaccgtccagttttttgcgcctcgacgaacattggatccaggctgaaagggccggcccgcatgtgttaagccttgtaaatcgatgaaattttatataacgaagcggggcactttggtcgcgcttggctttactgcgccaggcatcttttgcgcatctagaggtgactttaagagcgccagttcgtctcaaggttcaactgccggcaatgttcaggctatcggtcgccgattgatcgaggccctttctatatccatcagcggcggggaatgacgagtgcgccttgagcaatttcaggtttggtgcctactattccctatgtgctggttgtgagcgctcacggttttctcgctgtcgaaaccggcacggggtggcgtagatgttccttcgccggaaaaacatcggtaaggtagggtcgttaattcagacccgcgaggagtagtgatgagcgaggcgttgtccatccaccatgaccaggctggtcatcagttcgagaccaatgtggacggtcatcgtgcctacctgacctacatggacctcgggaagcagaccctggatatctatcgcaccttcgtgcccaacgcactgcgggggcgaggcattgcggctgcgttgaccgaggaagccttgaagtttgccgaagaggctggctacacggtgatcccgtcgtgctcctatgtcgaacgctacatggagcgccaccagcgccatgccgcgaagctgtaactgaccagttgccaataaaaaacgccgggcttagcccggcgtttttgtgtgcgcgaaacaggtacaggctcaggtgcgtttgcgctggggcaacacgtccttgagtttggcatgcatgctgcgcagggtggtttcggtggcggaccagtcgatacaggcatcggtgatcgatacgccgtactgcaagtcggccaggtcttttggaatcgcctggcaaccccagttcagatggctctccaccatcaagccgatgatcgactggttgccttccaggatctggttggcaacgttctccatcaccaacggctgcaacgccgggtctttgttggagttggcgtggctgcaatcgaccatgatgtttggcttgatcttggccttgttcagcgcctgttcgcacagggcgacgctgaccgaatcatagttgggcttgccattgccgccacgcagcaccacgtgaccgtaggcgttgcccttggtggtcacgatggacacgccgccttcctggttgatacccaggaaacggtgagggctggagaccgattgcagcgcattgatcgccacggtcaggccgccgtcggtgccgttcttgaagcctacggccgaggacaggccggacgccatttcgcggtgggtctgggattcggtggtgcgtgcgccgatagccgaccaactgatcaggtcctggaggtattgcggggagatcgggtcgagggcttcggtggcggtgggcaggcccatttcagccaggtccagcagcagcttgcgaccgatgtgcaagccgtcctggattttgaaggagtcgtccaggtacgggtcgttgatcaagcctttccagccgacggtggtacgcggcttctcgaaatacacgcgcatgaccaggtacaaggtgtcggacacctcagctgccagcaccttgaggcgctcggcatattcgtgggcggccttgaggtcgtggatagagcagggcccgatcaccacgaagaggcggtggtcggtgccgtcgagaatgtcacggatgacttcgcggcccttggtgacggtctgcagggcagcgtcgctcagggggatttcgcgcttgagctgatcgggggtgatcagggtctcgttggattcaacgttaaggtcattgatcggtaaatcagccatcgtgttactcgccagggtcacgggtgccggccgccagctatccccgtgcggcgggcacagcatgatttgaatgcaggggggaggaaccttagcgcgtaacacgggcccgcgacaatgggcaaagcccggtttaatccagcgctggctgcacaaccgcctcatgggagaactcgccggcatggcgcgacacccaatcacgggccatggcttccagttgcgcaggcgttggctcggcatcttcgtgcaggcggcagtaacgctcgatctggcacacttgctcgcccatccgcgcaccgaacaaggcgtgttcgtcggtaaagcagataccgatgcgatagccctgttcgaccttgcggcaccaggcaacatagcccggataacgggcgctgggccccagggaagggatatgcagatcaaccgccgtgccggcgcgccaggcacgcggccaattgcaggcgatgccgccacggccgatagtgtgcaggcgttggcagggaagggcgggagagggacgttggatcaactcgacagcgacatcatcagggtgaggtaaaaaacgacccatgcacacggactccgagcgccgtccagttgacggcaatggcagcagtatagtgaaggaactggaattgaccgacctggatattgaccagcaattgctgggattgccaggtatttcgctggtagtgttcaccagtgtcggttgtaccagttgccgctgggcacgccagcaattgcccggctggcacttgccggtggaccgcgtgtgctgggtggatgccgggcacaacggcggtgcggtgcaacgctaccagatctttcatttgccggcattgttcctggtatgcgagggtcaattccttgggcaattacaggcacgtcttacagcatccgacctcgccgaatgcgtaaaccaggcgctaacccgaacaccagaggatttgccatgacagcagttgcagccccgtcgccacgcattggcattatcggcaccggtgccattggtggttactacggactgatgctggcgcgtgccggcttcgacgtgcatttcctgttgcgcagcgaatacgccgcggtgagcaagcatggcctgcacgtcaacagtacggtgcatgggcaactgcacctgcatccggtgcaggcctatgccagcgccgccgacatgccgccgtgcgactggctattggtgggcaccaagtccaccggcaatgtggacctggcgccgaccatcgcccaagtggcggcgccggacgccaaagtggtgctcctgcaaaacggcctcgatgtggaagatagcctgcgtgaacacctgccgccttcgctgcatctgttgggcggcctgtgctacatcggtgtgcaccgctcggcccccggtgtggtcgagcatcaggcgttgggccgggtcaacctgggctatcacagtggcacggcggccaacgatgaggcgcggcaacaggcgattgtcgaagccggcgccgggctgtttcatcaagccggtatcgagtcccaggccatggccaatgtgcatctggcgcgttggcacaagctggtctggaatgtgccattcaacggcctctcggtgttgctgggcacgggcaccacggccatgatggccgacgagtccagccgcgagttgatccaggcgctgatggccgaggtggtgcagggcgctcatgcctgtgggcatgaaattcctgccagctacgccgggcagatgttcgccatgaccgaaaccatggacgactacctgcccagcatgtaccacgaccacctgcacaagcggcccttggaactggcggctatctacgcccgtcccttggccgctgccaaagcggccggttgcgaactgccacgcatacaggcgctgtaccaggccttgagtttcattgatcggcacaaccgctgattgggggggaaccactgaccaggctggccattgcgagaaagccagggaggtggtggccactgggcatgtgccctatggcatcagcaacgagttgagaatccagaccgagcgctagctgctaagctcattccatccccgccatcctggcagtccaggaggttttatgattcgttcgatgctgtttgccacggacctcggtctgtatgcaccctatgtgatgcaacatgcattggcgctggcgcgaacgttcaaggctgacctgtatgtgatccacgtggtcgagcccatcggcttgttcgccgaatcggtgttgcagagctaccttgatgaggccgccttgagcgaatggcagagcaaggggctgagcacggtgatggcgacgattgaacagcgcgtgctcgacagctttcgcgaggagtggggggaaggggagcaggacctgcaatggattcgctcggtcaaggtgatccagggggacccttgcgaggtgattctcgaccagttgcgaaaactgtctgtcgacttgctggtcgtcggcagtcatagccaggcaaccggcgtggccgtcccccttggacgtaccgccgcacgggtgttgcagttgtccccagtgccggtttacttggtgccgtcgctgcagcgtcggcgcagtgacgacagctgatcggtaaaaacgataaaaagttctagatttatccgccaaacctttaatatagttatataccgtcgctgatacccgtggcgtctatctgctttgagggattgatatgaagcttcaacaactgcgctacatctgggaagtggcgcaccacgacctcaacgtttccgctaccgctcaaagcctctacacctcgcagcctggtatcagcaagcagatccgcctgctcgaagacgagctgggcgtcgaagtcttcgcacgcagtggcaaacacctgacccgcgtcactccggctggcgagcgcatcatcaccaccgccggcgagatcctgcgtaaagtcgaaagcatcaagcagattgcccaggaattctccaacgagaagaaaggcaccttgtcgatcgccaccactcacacccaggcacgttatgcactgccgccggtgatccgcgatttcatcaagcaatacccggacgtggcgctgcacatgcaccagggttcgccgatgcagattgccgaaatggccgctgacggcaccgtcgattttgccatcgccaccgaagccctggaactgttcggcgacctggtgatgatgccctgctaccgctggaaccgttgcgtggttgtgcctcaggggcacccgttggccaagttgccgaagctgaccctggaagccttggctgaatacccgattgtgacctatgtgttcggctttaccggccgttccaagctcgacgaagccttcagccatcgcggcctcacgcccaaggtggtgttcaccgctgccgatgccgacgtgatcaagacctatgtgcgcctcggcctgggcgtcgggatcgttgccaagatggcggtcgacaccaacctggacaaagacctggtggtgctggatgccagcgaattgttcgagtccagcgtgaccaagatcggtttccgccgcggtactttcctgcgcggcttcatgtgcgatttcatcgagaagttcgccccgcacctgacccgcgaagtgatggcaaaggcgattcagtgccacaacaagcaagagctggaagagctgttcgacggcgtcgaattgcccgtccactgacacgattaccctgtaggcgcgagcaagctcgcgcctacaggggccgtaggttatctggcctcggtcaccgtaaagtactgccgagcgccggccaccagaatctccacctcttcatcgatacgcttgcccagcaggcctttgcccaagggcgagcgcggcgtgatgacggtcactggttgcccgaccacatccactttcaaacccgctgcatccggcgccaggaacagccattgctggcgaccgtcctcgtcttccaggcctaccagcgtgcctgtctctatcccacgttgatcatcgtacgcacgtagctgcaattgctggcacaagaccagcgattgcttgatctcctccactcgccgggcctgcccggtggccaggtacgaagcctccaggccgagggtgtcgtatttgttctcggcgatgttttcttcgtgggtcgcggtttcgtaagcggtctgcgcggcgcgttggacgatgtcgaggtcgacggtgagcttttccaggatcaactggagcacggcgtgtttattcatggcggtatctggcatcaatcgcagaattgcaggacattggcccgcgtcttttcattgggagcgttctggtcttgttgcagccagaactggcatttggggttggacaggttacgcgcgttgcttcgggcctgttccagagcctgttgttgttcctgtttatgcaggttctgttggtactgttcgaacaggcggttcggtggctgcggctcaaccatcgccggttggcccaattgctgaaccgcctgtgccaccggcgccaggctctgggggaacaggtagcgagacgccagccaggtggtcagcgcaatggcgataaaccctagccacacgcctgcggcaatcgcgatgcagagcttgaacagcgataacggacggtcagacataagggcctcctggcaggcattgacggcatggcggtgattgtcgcacagcctccgtgcagaataatcgcgatcaagccttctgcatccacgcatttatgcggacaatcagacctttgatcgatggagcccggaatgaaagcccgctgggatattttttgcagtgtcgtcgacaactacggcgacatcggcgtgacctggcgcctggcccggcagttggtggtggagcagggctgtgacgtgcgtttgtgggtcgacgacctgcgggccttcgaacgcatgtgcccggacattgatgtgcaggtgggccagcaatggcaagagggcgtgcaagtgcgtcactggccggccgaatggccgggcgcacaccctgccgatgtggtgattgccgcgttcgcctgccagctaccgcctgagtacatggaccgcatggccgagcgtgagcgtgcgcccttgtggatgaacctcgattacctcagcgccgaagactgggtggtgggctgccatcgcttgccttcggtgaagtacaagggcgtgcagaaatactttttcttccccggttttcgcccaggcaccggcggcctgttgcgcgaagccggcttgttggagcgccgccaggcatttcagcaggatgacctcgcgcagcaacagttcctgcaaagcctgggtgttgctccgacggccggtgcgcgtttgatgtcgctgtttgcctatgagaatgacggcttggccggctggctggacgtattggcagccgataggcgtgggacgcacttgctggtgccggaagggcgcattctgggggatgtgcaacgctggctgggcgtgaacagcttgtccgcaggtgacatccaggtgcgtggtgcgctgaccgtacaggtcattgcattcgtgcgtcaggagcaatatgaccgattgctatggtgctgcgaattcaacgccgtgcgtggcgaggactcattcgtgcgtgcccagtgggcgggcaggccattgctgtggcacatctaccgccaggacgaagacatccacctggacaagctcgacgccttcctggaactgtacaccgccgcactttcgccgaccgccaaggctgccgtcgttacgctctggcaagcctggaacgctgatggcgatatggcacagtcctggaaaatgctgctggaacattggccggaggtcagccagcacgcgcagaactggtgtctggaacaaggcttgcaggccgatcttgcgacggcgctggtacagttttatgaaagttggatatgatacgccaccttgatttttgtcaatcccatccaaatttcggatatacgcaatgaaaactggtaaagaactgaaacccggtacagtgatccgtctcgaaaacgacccttggctggttcagaaagctgagttcaccaagtctggtcgtaacagcgcaatcatgaagaccaagctgaagaacctgctgaccggttacaagaccgaaatcgtctacagcgccgatgacaaactggacgacgtgatcctcgaccgcaaagaagcgaccctgtccttcatcagcggcgacacctacacgttcatggacaccaccgactacaccatgtacgagctgaacgctgaagatatcgaagccgttctgccgttcatcgaagaaggcatggaagacgtctgcgaagcgatcttcttcgaagagcgcctggtttccgtagaactgccgaccaccatcgtgcgtaaggttgcttacaccgaaggctccgctcgcggcgacacttccggcaaggtgatgaagcctgccaagctgagcaacggtaccgaactgcaagtggccgatttcatcgaaatcgacgacctgatcgagatcgacacccgtgaaggtggttcgtacaaaggtcgcgccaagaagtaattctggccccggcgatacgaaaaaaagcccgaccttgagtcgggcttttttttggcgtctacttgatcacttcaagtgttgtttcaactcatctgatgcttgcagtaaggccgaacgtaccgcaggcacctggctgaccacattgagcaagccgtagtcgtggatcatgccgttgtagcgtacggccgtcaccggtacacctgcctgatccagcttgcgggcatacgcctcaccttcgtcacgcagcacgtcggcctcggcggtctgcaccagcgcaggcggcaagcctttgagctgcgcagttgtagcccgcaatggtgaagcatagatctcggcgcgctgagtggcatcggtggtgtagttgtcccagaaccatttcatcatgtttttggtgaggaagtgcccctcggcaaactggttgtaggagcctgtgtcgaagttggcgtccgtcaccggccatagtagaagttggaacttgatggctggcgtgcccttatccttggccatcaggctgaccaccgccgccatattaccgccgacgctattgcctgccacggcgagacgtttgccatcaacattgatctccttgccgtgttcagcgacccacttggttgcaccgtaggcctggttgatcgccactgggtaatgcgcttccggtgatggcgtgtagttgacgaataccgcgaccgcccccgagcccactaccagatcacgtaccaggcgttcatgggtcgggtaatccccgagcacccagccgcccccgtggaaaaacataaacaccggcaaagtgcccttgaccccggccggtcgcacgatggtcaggtcaagcggctggccgtcgacttgaatggtcttctggctcacatccgtcttgggcagggtcagcttcaccccggcctgggcgccagtcagcaccgcgcgcgcctcttggggtgtcagttgttccagcggcttgccggtacccgaattcaatacatccaggaaggcctgggtgttgtgctcgatatcaccgttagcggcgaaggcgctggtgatagacagggcaagcagggtgccggtgagcattttgccgatcgttttcatgtttcctcctgggggtggtagtggtcgttacacggctacgtgcaggcgcacatcaacgttgccgcgagtagcgttggagtacgggcagacttggtgggcggcgtcgaccaggctttgcgcatcgtcctgggccaggcccggcaggctgatgtgcaggtcgatgtccaggccgaaaccgccggggatctgcccgatgcctacatgggcagtgatcgatacgtcatccgggatattgcgttgggtctggctggcgacgaatttcagggcaccgataaagcaagccgagtagccggcagcgaacagttgttcagggttggtggcctggccaccggcgccgcccaattccttcggggtggacagtttgacgtcaaggatgttgtcgctggaaacagcacggccatcacggccgccggtggcagtggctacggcggtatagagagtttgcatgggactttcctcgcgggtttttgcgcaaaatatttgcgcgctaagtaatttgtagcgaatatattccgctaatattttgcgcgcaagttaaattttaaaaagccgaatttttccgaccgccgcgcttaggttgtaagaagaaagtgctttatgacgtgagcaatacggctcggactataggactaatctgagccgtttaactggagagggggagtgatggctccgggcggtattacaggctgtcttgaaggttgcctctcagcgccagcagatcgttttgcagcgtgcgcagttgttcgatgtccaacccgctggcgccgaggatgcattggggaacatccatggccttccctcgcaacgcgcggccggcgtcggtcagttccactacgaccacccgctcatcttcgcggctgcgggtgcgactgagcaggccctcagcttccagacgcttgagcagcggcgtcagcgagccagggtcggtcagcaggcggctgctgatttcgccgacggtcaatccatcctcttcccacagcaccatcatggccaggtattgcgggtaagtcaggcccagggcttggagcaggggcttgtagaccttggtcatcagcagcgaggtggagtgcagggcgaagcacaactggttatccagcagcagggattggcaggggtcagggtttttgctcattgtggtgcctcgaaaaaacgtgtctgtgctggaatctagcgggcgaatctttaatgcgccagataattctatccaagtggtcagaccaggccgctttgcaatgccagatcccagggcggcaccgggctgaaacgggatttgaggtattcgagcaataatcggctacgtgcgttgggctgttgttcgaggcgcagcgcgtaaatgccggcggtttcggggctgggcaagccgtttgcacaaaacagcggcaacagttctccacgcaccagatattcactggccaaccaggtcggcaggtgcgcgatgcccagcccggccagtgcgcccgaaagcagcgcctcggcgttattggcgctcatgcggatgcgccgggggcgataggtagtgcggcgcccgtccagttcaaagcgccaggcgaacatcggcgccaggccatcccaatcgaggccgtcatgctcgctcagttcccgcggatgggtgggtgtgccgcgggttttcagataggtcgggctcgcacaggcaatgcgcacgatgctcgccaggggtgtagcgatccgacgagtgtcgacgatatgcccggcgcgcagcaccaggtctaccttgccaaggtgtgcgccttgcatatcgacaaagctgtcgatcaagtgcaggtgcacatccagccctggatacacgttcaagaagtccgcgatcaccggcgccaggtggcggcgaccaaacgctgccggtgcatctacccggatcaacccttccggcgcatggctcagggacaccgcttcggcccgcgccaattgcagttcactgacaatccgccgcgcgcgttcggcaaaggccaagccggcaggtgtaggcactaccgcgtgggtgctgcgctggaacaggcggctacccactgaaccttccaggctgtcgattcgacgcgctactgccgagggcgtcagtggatgacgtcgtgcggcagcggaaaagcttccggtttccatcacatcgagaaacaggctcagttggtcggtcagagtattggggttcataggcgagcgcttgtgcgatattggcatagccattgtgcgttgctgtgcgtttccataccagagctgactgcgtagcatgccagtcttgggattgcggagtagtgcgtggtgttggatttagtcatgtacctgatattgggcgcagccctgggcaccgtgggtgggttgtttggcattggcggcgggctgatagccattccggtgctcggcgtgctgttcggcctggatcagcaaattgcccaaggcaccgcgctggtcatggtggtacccaatgtgatgctcgccctgtggcgctatcaccagcgtaatcgcatcgagttgcgccacgccttgccgctgggcgtgatgggcttctgctttgcgtggctggggtcgatctgggcggtggggctggatgccggggcaatgcgcatcggctttattgttttcctggtggcgttgtcggcctacaacctattgcgcatgttcacccgcaacgcgccgcccacggcgcagatgcgctactcctggccctggctgggtgtgttgggcgcagcgtccggatccatgggcggattatttggggtagggggcgcggtggtcgccacacccgtgctcaccagtgtgttcggcaccgctcaagtggtcgcccagggtttgtccctggccttggcgctgcccagcaccggtgtgaccctggtcacctatgcctggcaccacgaggtggactggatgatcggcctgccgctggcggtgggggggctgctgagtatcagttggggcgtgaaagtggcccatgccttgccggagcgtctgttgcgcggcctcttctgtggctttttggtggtgtgcgcggtgatgctgacctttaaagtttgaagccttcgacgatgtagtccgccaggcattcggtgatcggcgaggtcatctgcgggttacgcagcaagcgcaggttcatcgacggcaaaggcgggaagccttcgtcgctgccgagcacgcgcaggtcgtcggtgaccaggctttccatgctgaccatcgccgccaggcccgcactcaccaccgccaggatcgctgctccgttagagctgtgataggccaggcgataatctcgcccagccgcgtccagtgcggcacgtgcccaatgggtgtacaggcactcgtcgccggacaccgccaggggtagggcatcgtgctcctccacacaaaagcacggcgatgctgcccacaccatgcgttcggtacgcaataactcacccagatcgtttccaggttcgcggctgatcacggtcaacgccaggtcccgccgctgcatcaatacggtcgatgcttcgcagtgcatttcgatctgaatcagtgggtaggctttggaaaactgcttaaggatcccaggcagaaagcgcatcacgtagtcatccggcgtgccgatgcgcaccaagcccaccatgtggggctcgcgcaaggtattgaacacctcgctgtgcaatttcaggatgcgccgcgcataacccaacagcacctggccttcgggcgtgagccgtacctgccggccatcgcgctcgaacagtttgcgctgcagtatgtcctcttccaggcgcttcatctgcatgctcaccgccgattgagtgcggttgacctgctcgccggcgcgggtgaaaccgccctggtcggcaatggcgacgaaggtgcgcagcacgtctgtgtcgatgctgggataggcggacaattgatcaatctccgagatgtaatgcataagaaacattcgttggattgatcataatgcccggcacacactgtcgtcatccccactggagggcgagaagatgaaaggtcaaaaaggtttcatatcgacggataaatggccgtttgccgggttgtttcacacattcgcgcgttggcagctgttgcatcaggagcgccagatgctggcgaccctgagcgatgaagccctcaaggacatcgggctcaatcgcgccgacgtcgcgcaggaaagccatcggcatttctgggaagacccgctgcgaaaataagcgcggatgcagtagggtagggggcgagcttctatggagattgccatgcccgctgacctgtgtttttcactcaagcaagctcgacgcatggcgctggctgcccagggattttccgggcgccaggcgcctgcacagataaaggctgcgcacctcaaccgcttgatcgaacgcctgggcgttttacaggtcgactcggtcaatgcgctggtgcgttcccactatctgccggtgttttcccgccttggttcttattccccgtcgatccttgagcaggccgcctggagccaggggcggcgacgctcactgttcgaatactgggggcatgaggcgtcgctgctgcccatggccctgtacccgctgatgaagtggcgcatggagcgcgcgcggcaagggcaggggatctatgcgcaaatggcacgttttggccgtgaacagcaggcgactatccagcgcgtgttacgcatcgtcgaacagcagggcgccttgggggccggcagcttgtcgacccgcgaggagcgtgccgggccttggtgggattggagtgatgaaaagcacgcgctggaatggctgttcgccgctggtttggtcacggttgccggtcgccgagggttcgagcggctttatgatttgcccgaacgcgttatccccgccgaggtgctcaatgtctccatgggtgaggctcaagcgcagcgcggcttgctgttgcacagtgcgacggcattgggtgtcgccaccgaaaaagacctgcgcgattattttcgcctcgagcccgccgacagccgcaaccgcttggccgagctggtcgaggataggcaactgctgacgtgccaggtgcggggttggcagcaacccgcgtattgcctggcgcagccgaaactgccgcgcaacgtaccggccagcgcactgttgtcaccgttcgattcgctgatatgggagcgcagccgcaccgagcgcttgttcgactttcgctatcggctggagatctacaccccgcaagaaaagcgcgtgtatggctattacgtgctgccgtttctgcacaacgagcgcattgccgcgcgcgtcgacctgcgggccgagcgtgcccatgggcgcctggccgtacatgccgtgcacgaggaagagccggggctggatgaggaaggcatgctggcgctggcattgaacctacgcaaaatggccgactggctagggctggaacaggttcagctcaattgccaacggcccagcgctgcccgattgagggctgcgatgctgaaccgggatgtcagcctttaagggccctatcgcgggccagcccggctcccacagagaaacgcgttcaaatgtgggagccgggcttgcccgcgatggcgtcatcccggtcgataaagcgtcagcgctttacctgtttcaaggtctcggcaatcagaaacgccaactccagcgactgatcggcattcatccgtgggtcgcaatgggtgtgatagcggtccgacaggccatcttcggtgatcggccgtgcgccgccgatgcattcggtgacgttctgcccggtcatctcgatatggatcccgccagcataggtgccttctgcctggtgcacctggaagaaatccttcacttcgccaaggatctgcgcaaagtcacgggtcttgtagccactgctggccttgatggtgttgccgtgcatcgggtcgcagctccacagcacttgcttgccttcgcgctgcacggcacggatcaggttgggcaaatggtcgccgaccttgcctgcccccatacgggcgatgaggttaaggcggccggggtcgttatccgggttgaggatgtcgatcaggcggatcaggtcgtcagggttcatgctcggtccgaccttcacgccgatcgggttgtttaccccgcgcaggaactcgacatgggcgccgtccaactgacgggtgcggtcgccgatccacagcatatgtgccgagcagtcgtagtagtcgttggtcaggctgtcgcggcgtacgaaggcttgttcatagttgagcagcaacgcttcgtgggcagtgaagaagctggtttcgcgcaattgcggcgagctgtccatgccacaggcgcgcatgaaggccagggtttcgtcgatgcggtcggccagttggctgtacttctcggcgagggcggagttggcgatgaaatccaggttccacttgtgcacttggtgcaggtccgcgaaaccgccctgggcaaaggcgcgcagcaggttgagggtggcggtggactggtggtaggactgcagcagacggtccgggtctggcacgcggcttttttcgtcgaagccgatgccgttgacgatatcgccacggtaggcgggcagggtgatgccgtcgatggtttcatcgttggccgagcgtggcttggcgaactgaccggccatgcgcccgactttcaccaccgggcaaccggcggcgaaggtcatgacaatagccatctgcagcagcaccttgaaggtgtcgcggatcttcgcggcggaaaactcggcaaagctctcggcgcaatcgccaccttgcagcaggaaggcacggccctgggtcacttcggcaaactgacggcgcaattcgcgggcttccccggcaaacaccaggggcgggtagctcgccaggctttgttccacttgcagcaagtgggcagcgtccgggtattggggttgctgctggatcggcagggctcgccagctatcggggctccagggttggctcatcatgaactcgtttgcgggtggatgtcggggcgtcaatgttagcagcaattagtacgtgacctgtggctgccgcttggccgacaatcgcgcctttgtcgtgcggtagaccctttaggagtagtgatgagcgaggagcgtgtcgagcgcctgctggccgaagtccatgatgaattcggcatgatccgtgtgcttgaagtggcggattaccgctttctcgaattcggcgatgccattgagcaaagctgtgtattcaccgctgacccgagctggctggagtacgactatacccgcgcgatgctgatcggtgcgttgtgccatgagcagccggagagtgcgttgtttctcggcctgggcgcgggcacgttgacccaggcgtgcctcaagttcctggcgctggacgatgtcgaagccattgagctgcgccccgatgtaccgcgcctggcgattgaatatctggggctggatgacgatccgcgcttgtacatccgcattggtgacgcgctgcaattgctcgacagtgccgaatctgccgatctgattttcgtcgacctctacaccgatgtcggcccgggcgtggggcatctggcctggacctttctggaaaactgccagaagaaactcaaccccggcggctggctggtgatcaaccagtgggccaccgatgatggcaaaccgctgggggcggcgttgctgcgtgggttgtaccaccggcattactgggagctgccggtgaaggagggcaatgtgattctgttggtgccttcggagttggatcaggagctggacctggaggcgctgtcggcccgcgccgaagccttggcgccgcggttggggtattcgttgcagccgttgatcaaggcgattcggccagcaacttagttgtcagttcgggcgctttcgcgggcttgcccgcgaagaggccctcactgccgaccgctaattcagttcgttcaaatccccttgaacacccccggccgcttctcgatcatcgcccgaacaccctccttggcatcctcactgttaagcagtttatccaccatgggcggcagcgcggcggctgcgacggcctcaccctccatccgcgccagccgcgccgacatcaacgtggcctgcacacccagcggtgcctggcgcgcaatgcggttggccaactcgatggcgcggggcaacaggtcttcactggccatcacttcctgcaccaaccccaggcgcagggcttcatgggcgtcgaattcgtcgccagtgagcagccagcgcatcgcattgccccagccggcgatttgatgaaagcgcaatgtcgcgccgccaaacgggaagatcccacgttgaacttccatctgggcaaagcgggtattgctggcgcagaggttgatatccgccgccagcatcaattcgataccgatcgtcaggcaataaccctgggcggcgacgatcaccggcttgcttacgcgcgggccggcaaacaccccccacgggtcgcaccctcccagcggcggttgccagccgcccgccatcacgctgctgacattggccaggtccagcccagccgtgaagtgatcgccatgggcaaacaccacggccacccgagcgtcatcgtttcgatcaaattcgccataggccaggctcagcgcattgagcaaatcaaggtcgaaggcgttgcgtttggccacacggtccaggcccagcaatagaacatggccctcaagtgcgcggctgacacggctactgctggcttgattcatggggtgtgccctcggggcgcgggtaaggtttcagaccaaagggtctcaatggttgggtgaaccgtttaagcttgatggccaacagggccgggcctctgaaaaatagaccctggcgcacggatctgcaaaacgcgtgacgcagtgcgctttatcggtgcctgacgataaaaaaagctccctttttcagctatttccggtatagtgcgcgccggcctttaaccgggccgcgtttaggtagcgcaattccccgaagtcagcttcggctgcacgtccgcacagcggactctcccttgacgaatctttttcattcattcgttttcgcaaatccccgccgacaaagcagccagggcgactcttgagtctcaacacggcatgcgcagctttggagcatgggtctttgcggatgcacttagaggcagacccatgacccaggaaaccggcggcttcgccgcttttaatcttaacccgaatattcttgcagccgtcgcagcgaccggctacgaagaaccttcggcgattcagcagcaatcgatcccgatcatcatggccggtaaggacatgattggccaggcgcaaaccggtaccggtaaaaccgccgcgttcgccctgcctattctgcattgcatcgatcctgccaagcgcgagccgcaagccctgatcctggcgccaacccgtgagttggcgctgcaagtagcaaccgcctttgaaacctacgccaagcaaatgccgggtgtaactgttgtggccgtttacggcggcgcgcctatgggcccacaactcaaggcaatccgtaatggcgcacagattgttgtcgccactccgggccgtctgtgcgaccacctgcgtcgtgacgaaaaagttctgtcgaccgtgaaccacctggttctggacgaagctgacgaaatgttgaagctgggcttcatggatgacctggaagtcatcttcaaggcactgccagcgacccgtcagactgtactgttctcggccaccctgccgcagtccatccgtgccattgccgaacgccacctgcgcgatccggagcacgtgaagatccagaccaagacccagaccgttaccgcgatcgaacaggctcacctgttggttcacgctgaccagaagacctcggctgtattgagcctgctggaagtcgaagacttcgacgccctgatcatgttcgtgcgcaccaaacaagcgaccctggacctggctagcgccctggaagccaaaggctacaaagccgctgcgctgaacggtgacattgcccagaaccagcgtgagcgcgtgatcgactccctcaaggatggccgtctggacatcgttgtagcgaccgacgttgccgcccgtggcctcgacgttccacgtatcacccacgtgttcaacgttgacatgccttacgatccagagtcctacgttcaccgtatcggccgtactggccgtgccggtcgcgaagggcgtgcattgctgctggtgactccacgtgagcgccgcatgctgcaagtgatcgagcgtgttaccggtcagaaagttgccgaagtccgcctgccggatgctcaggccgttctcgatgcgcgcatcaagaaactgaccaacagcctggcgccactggtggctgacgctgaatcgactcacggcgacctgctggaccgcctgaccgccgatatcggttgcaccccgcgtgccctggctgcagctctgctgcgcaaagccaccaacggtcaagccctgaccctggcagccatcgagaaagaacgtccactggttccgaacagcgcgccacgcggtgatcgtccagagcgttccggtgaccgtccagaccgtggcgaccgtgagcgtcgtgctccagtgccattggctgaaggccgtgctcgttgccgtaccgcgctgggtgcgcgtgatggtatcgctgccaagaacctgctgggcgctatcctcaacgagggtggcctggcgcgtgaagccatcggtcgtatccaggtgcgtgacagcttctccctggtggagctgccggaagacggcctggaaaaactgctgaccaagctcaaagatactcgcgttgccggtaagcagctcaagctgcgtcgctaccgcgaagattgatccgcccttgggctgattgatcgcacataaaaaatccccgactggttcggggattttttttgcctgatgtttagtctccggcacgaacaactgtgggagctggcttgcctgcgatagcggtgagtcagcaagccagtgtgtgactgatacacctggagtcagcaagccagtgtgtgactgatacaccgctatcgcaggcaagccagctcccacaggggtaacggtgtcagccaaagcgatagatatccatgcccagggcgcccagtgtgaagccttggtgcgccacgctgaaatctgcgcccgcaccccgcgcgaagtacaacggcagcagatgctcatcgctgggatggctgcgcacggcatggggcgcctggcggcgatagtcatgcaaggcggcgtcgtcattggccgccagtctgtcgaccacccagtcgcgaaactcccgcgcccacggtgtgatcgtctccggcccggcgcgccaatccaattcgcccaggttatgggtgatgctgccggagccgatcaacagcacaccctgttcacgcaggctggcgagtgcatgccccacgcgggtctgcaaggcggggcccatacgactgggcaaggagacttgcaccaccgggatgtccgctgccgggtacatcagcgacagcgggacccaggtgccatggtcgaagggccgacgttcatcaatgctggcagccagaccgtcggcgtgcagcaattcgacgatctcactggccagttgtgggtcacccggcgcggggtattgcaccgcaaacagctcgcgcgggaagccgccgaagtcgtgccaggtttcgggtgcagcactgccgctgaccagcagctgcgggctttcccaatgcgccgacaccaccacaatggctttgggccgtggcagctcggcagccagacgctgcagcgcagggccgctggcgccgggttgcaaggccagcatgggcgagccgtgggagataaacaggctggggagcatgagcagggtcctgagggttaagatggagccatcttcaatcagctcattgatctaaatctaatataagttttagcgccttttgatcgaattttcggagtgattcatgcagcctgaattttggcaggaccgctgggcgagcaatcagatcggtttccatcagcgcgaggtca

(The sequence listing continues in the following parts.)
